(19) United States
(12) Patent Application Publication
(10) Pub. No.: US 2023/0279412 A1
(43) Pub. Date: Sep. 7, 2023

(54) GENE EDITED SOYBEAN PLANTS WITH ENHANCED TRAITS

(71) Applicant: INARI AGRICULTURE TECHNOLOGY, INC., Cambridge, MA (US)

(72) Inventors: Tomá{hacek over (s)} Cermák, Brookline, MA (US); Richard Bailey Flavell, Malibu, CA (US); EVA KONECNA, Brookline, MA (US); Yajie Niu, Lexington, MA (US); Michael Lee Nuccio, Salem, NH (US); Jennifer A. Raji, Waltham, MA (US); RANDALL WILLIAM SHULTZ, Davis, CA (US); Davide Sosso, Cambridge, MA (US); Maria Margarita D. Unson, Pawcatuck, CT (US); John Patrick Casey, Jr., Boston, MA (US); Michael Andreas Kock, Rheinfelden (DE)

(21) Appl. No.: 18/302,601

(22) Filed: Apr. 18, 2023

Related U.S. Application Data
(62) Division of application No. 16/261,243, filed on Jan. 29, 2019.
(60) Provisional application No. 62/623,485, filed on Jan. 29, 2018.

(51) Int. Cl. C12N 15/82; C12N 9/22; C12N 15/11

(52) U.S. Cl. CPC C12N 15/8213; C12N 9/22; C12N 15/11; C12N 2800/80; C12N 2310/20

(57) ABSTRACT

The invention relates to novel soybean plants, seeds and compositions, as well as improvements to plant breeding and methods for creating modifications in plant genomes.

### CROSS-REFERENCE TO RELATED APPLICATIONS

[0001] This application is a divisional of U.S. patent application Ser. No. 16/261,243, filed Jan. 29, 2019, which claims benefit of priority to U.S. Provisional Patent Application No. 62/623,485, filed Jan. 29, 2018, which are incorporated herein by reference in their entireties.

### SEQUENCE LISTING XML

[0002] The instant application contains a sequence listing, which has been submitted in XML file format by electronic submission and is hereby incorporated by reference in its entirety. The XML file, created on Apr. 18, 2023, is named P13468US02.xml and is 1,925,122 bytes in size.

### FIELD OF THE INVENTION

[0003] Disclosed herein are novel soybean plant cells, soybean plants and soybean seeds derived from such plant cells and having enhanced traits, and methods of making and using such plant cells and derived plants and seeds.

### BACKGROUND

[0004] Plant breeding and engineering currently relies on Mendelian genetics or recombinant techniques.

### SUMMARY

[0005] Disclosed herein are methods for providing novel soybean plant cells or soybean plant protoplasts, plant callus, tissues or parts, whole soybean plants, and soybean seeds having one or more altered genetic sequences. Among other features, the methods and compositions described herein enable the stacking of preferred alleles without introducing unwanted genetic or epigenetic variation in the modified plants or plant cells. The efficiency and reliability of these targeted modification methods are significantly improved relative to traditional plant breeding, and can be used not only to augment traditional breeding techniques but also as a substitute for them.

[0006] In one aspect, the invention provides a method of changing expression of a sequence of interest in a genome, including integrating a sequence encoded by a polynucleotide, such as a double-stranded or single-stranded polynucleotides including DNA, RNA, or a combination of DNA and RNA, at the site of at least one double-strand break (DSB) in a genome, which can be the genome of a eukaryotic nucleus (e. g., the nuclear genome of a plant cell) or a genome of an organelle (e. g., a mitochondrion or a plastid in a plant cell). Effector molecules for site-specific introduction of a DSB into a genome include various endonucleases (e. g., RNA-guided nucleases such as a type II Cas nuclease, a Cas9, a type V Cas nuclease, a Cpf1, a CasY, a CasX, a C2c1, or a C2c3) and guide RNAs that direct cleavage by an RNA-guided nuclease. Embodiments include those where the DSB is introduced into a genome by a ribonucleoprotein complex containing both a site-specific nuclease (e. g., Cas9, Cpf1, CasX, CasY, C2c1, C2c3) and at least one guide RNA, or by a site-specific nuclease in combination with at least one guide RNA; in some of these embodiments no plasmid or other expression vector is utilized to provide the nuclease, the guide RNA, or the polynucleotide. These effector molecules are delivered to the cell or organelle wherein the DSB is to be introduced by the use of one or more suitable composition or treatment, such as at least one chemical, enzymatic, or physical agent, or application of heat or cold, ultrasonication, centrifugation, electroporation, particle bombardment, and bacterially mediated transformation. It is generally desirable that the DSB is induced at high efficiency. One measure of efficiency is the percentage or fraction of the population of cells that have been treated with a DSB-inducing agent and in which the DSB is successfully introduced at the correct site in the genome. The efficiency of genome editing is assessed by any suitable method such as a heteroduplex cleavage assay or by sequencing, as described elsewhere in this disclosure. In various embodiments, the DSB is introduced at a comparatively high efficiency, e. g., at about 20, about 30, about 40, about 50, about 60, about 70, or about 80 percent efficiency, or at greater than 80, 85, 90, or 95 percent efficiency. In embodiments, the DSB is introduced upstream of, downstream of, or within the sequence of interest, which is coding, non-coding, or a combination of coding and non-coding sequence. In embodiments, a sequence encoded by the polynucleotide (such as a double-stranded DNA, a single-stranded DNA, a single-stranded DNA/RNA hybrid, or a double-stranded DNA/RNA hybrid), when integrated into the site of the DSB in the genome, is then functionally or operably linked to the sequence of interest, e. g., linked in a manner that modifies the transcription or the translation of the sequence of interest or that modifies the stability of a transcript including that of the sequence of interest. Embodiments include those where two or more DSBs are introduced into a genome, and wherein a sequence encoded by a polynucleotide (such as a double-stranded DNA, a single-stranded DNA, a single-stranded DNA/RNA hybrid, or a double-stranded DNA/RNA hybrid) that is integrated into each DSB is the same or different for each of the DSBs. In embodiments, at least two DSBs are introduced into a genome by one or more nucleases in such a way that genomic sequence (coding, non-coding, or a combination of coding and non-coding sequence) is deleted between the DSBs (leaving a deletion with blunt ends, overhangs or a combination of a blunt end and an overhang), and a sequence encoded by a polynucleotide (such as a double-stranded DNA, a single-stranded DNA, a single-stranded DNA/RNA hybrid, or a double-stranded DNA/RNA hybrid) molecule is integrated between the DSBs (i. e., at the location of the deleted genomic sequence). The method is particularly useful for integrating into the site of a DSB a heterologous nucleotide sequence that provides a useful function or use. For example, the method is useful for integrating or introducing into the genome a heterologous sequence that stops or knocks out expression of a sequence of interest (such as a gene encoding a protein), or a heterologous sequence that is a unique identifier nucleotide sequence, or a heterologous sequence that is (or that encodes) a sequence recognizable by a specific binding agent or that binds to a specific molecule, or a heterologous sequence that stabilizes or destabilizes a transcript containing it. Embodiments include use of the method to integrate or introduce into a genome sequence of a promoter or promoter-like element (e. g., sequence of an auxin-binding or hormone-binding or transcription-factor-binding element, or sequence of or encoding an aptamer or riboswitch), or a sequence-specific binding or cleavage site sequence (e. g., sequence of or encoding an endonuclease cleavage site, a small RNA recognition site, a recombinase site, a splice site, or a transposon recognition site). In embodiments, the method is used to delete or otherwise modify to make non-functional an endogenous functional sequence, such as a hormone- or transcription-factor-binding element, or a small RNA or recombinase or transposon recognition site. In embodiments, additional molecules are used to effect a desired expression result or a desired genomic change. For example, the method is used to integrate heterologous recombinase recognition site sequences at two DSBs in a genome, and the appropriate recombinase molecule is employed to excise genomic sequence located between the recombinase recognition sites. In another example, the method is used to integrate a polynucleotide-encoded heterologous small RNA recognition site sequence at a DSB in a sequence of interest in a genome, wherein when the small RNA is present (e. g., expressed endogenously or transiently or transgenically), the small RNA binds to and cleaves the transcript of the sequence of interest that contains the integrated small RNA recognition site. In another example, the method is used to integrate in the genome of a soybean plant or plant cell a polynucleotide-encoded promoter or promoter-like element that is responsive to a specific molecule (e. g., an auxin, a hormone, a drug, an herbicide, or a polypeptide), wherein a specific level of expression of the sequence of interest is obtained by providing the corresponding specific molecule to the plant or plant cell; in a non-limiting example, an auxin-binding element is integrated into the promoter region of a protein-coding sequence in the genome of a plant or plant cell, whereby the expression of the protein is upregulated when the corresponding auxin is exogenously provided to the plant or plant cell (e. g., by adding the auxin to the medium of the plant cell or by spraying the auxin onto the plant). Another aspect of the invention is a soybean cell including in its genome a heterologous DNA sequence, wherein the heterologous sequence includes (a) nucleotide sequence of a polynucleotide integrated by the method at the site of a DSB in the genome, and (b) genomic nucleotide sequence adjacent to the site of the DSB; related aspects include a plant containing such a cell including in its genome a heterologous DNA sequence, progeny seed or plants (including hybrid progeny seed or plants) of the plant, and processed or commodity products derived from the plant or from progeny seed or plants. In another aspect, the invention provides a heterologous nucleotide sequence including (a) nucleotide sequence of a polynucleotide (such as a double-stranded DNA, a single-stranded DNA, a single-stranded DNA/RNA hybrid, or a double-stranded DNA/RNA hybrid) molecule integrated by the method at the site of a DSB in a genome, and (b) genomic nucleotide sequence adjacent to the site of the DSB; related aspects include larger polynucleotides such as a plasmid, vector, or chromosome including the heterologous nucleotide sequence, as well as a polymerase primer for amplification of the heterologous nucleotide sequence.

[0007] In another aspect, the invention provides a composition including a plant cell and a polynucleotide (such as a double-stranded DNA, a single-stranded DNA, a single-stranded DNA/RNA hybrid, or a double-stranded DNA/RNA hybrid) donor molecule that is capable of being integrated at (or having its sequence integrated at) a double-strand break in genomic sequence in the plant cell. In various embodiments, the plant cell is an isolated plant cell or plant protoplast, or is in a monocot plant or dicot plant, a zygotic or somatic embryo, seed, plant part, or plant tissue. In embodiments the plant cell is capable of division or differentiation. In embodiments the plant cell is haploid, diploid, or polyploid. In embodiments, the plant cell includes a double-strand break (DSB) in its genome, at which DSB site the polynucleotide donor molecule is integrated using methods disclosed herein. In embodiments, at least one DSB is induced in the plant cell's genome by including in the composition a DSB-inducing agent, for example, various endonucleases (e. g., RNA-guided nucleases such as a type II Cas nuclease, a Cas9, a type V Cas nuclease, a Cpf1, a CasY, a CasX, a C2c1, or a C2c3) and guide RNAs that direct cleavage by an RNA-guided nuclease; the dsDNA molecule is integrated into the DSB thus induced using methods disclose herein. Specific embodiments include compositions including a plant cell, at least one dsDNA molecule, and at least one ribonucleoprotein complex containing both a site-specific nuclease (e. g., Cas9, Cpf1, CasX, CasY, C2c1, C2c3) and at least one guide RNA; in some of these embodiments, the composition contains no plasmid or other expression vector for providing the nuclease, the guide RNA, or the dsDNA. In embodiments of the composition, the polynucleotide donor molecule is double-stranded DNA or RNA or a combination of DNA and RNA, and is blunt-ended, or contains one or more terminal overhangs, or contains chemical modifications such as phosphorothioate bonds or a detectable label. In other embodiments, the polynucleotide donor molecule is a single-stranded polynucleotide composed of DNA or RNA or a combination of DNA or RNA, and can further be chemically modified or labelled. In various embodiments of the composition, the polynucleotide donor molecule includes a nucleotide sequence that provides a useful function when integrated into the site of the DSB. For example, in various non-limiting embodiments the polynucleotide donor molecule includes: sequence that is recognizable by a specific binding agent or that binds to a specific molecule or encodes an RNA molecule or an amino acid sequence that binds to a specific molecule, or sequence that is responsive to a specific change in the physical environment or encodes an RNA molecule or an amino acid sequence that is responsive to a specific change in the physical environment, or heterologous sequence, or sequence that serves to stop transcription or translation at the site of the DSB, or sequence having secondary structure (e. g., double-stranded stems or stem-loops) or than encodes a transcript having secondary structure (e. g., double-stranded RNA that is cleavable by a Dicer-type ribonuclease). In particular embodiments, the modifications to the soybean cell or plant will affect the activity or expression of one or more genes or proteins listed in Table 5, and in some embodiments two or more of those genes or proteins. In related embodiments, the activity or expression of one or more genes or proteins listed in Table 10 will be altered by the introduction or creation of one or more of the regulatory sequences listed in Table 9.

[0008] In another aspect, the invention provides a reaction mixture including: (a) a soybean plant cell having at least one double-strand break (DSB) at a locus in its genome; and (b) a polynucleotide (such as a double-stranded DNA, a single-stranded DNA, a single-stranded DNA/RNA hybrid, or a double-stranded DNA/RNA hybrid) donor molecule capable of being integrated at (or having its sequence integrated at) the DSB (preferably by non-homologous end-joining (NHEJ)), wherein the polynucleotide donor molecule has a length of between about 18 to about 300 base-pairs (or nucleotides, if single-stranded), or between about 30 to about 100 base-pairs (or nucleotides, if single-stranded); wherein the polynucleotide donor molecule includes a sequence which, if integrated at the DSB, forms a heterologous insertion (wherein the sequence of the polynucleotide molecule is heterologous with respect to the genomic sequence flanking the insertion site or DSB). In embodiments of the reaction mixture, the plant cell is an isolated plant cell or plant protoplast. In various embodiments, the plant cell is an isolated plant cell or plant protoplast, or is in a monocot plant or dicot plant, a zygotic or somatic embryo, seed, plant part, or plant tissue. In embodiments the plant cell is capable of division or differentiation. In embodiments the plant cell is haploid, diploid, or polyploid. In embodiments of the reaction mixture, the polynucleotide donor molecule includes a nucleotide sequence that provides a useful function or use when integrated into the site of the DSB. For example, in various non-limiting embodiments the polynucleotide donor molecule includes: sequence that is recognizable by a specific binding agent or that binds to a specific molecule or encodes an RNA molecule or an amino acid sequence that binds to a specific molecule, or sequence that is responsive to a specific change in the physical environment or encodes an RNA molecule or an amino acid sequence that is responsive to a specific change in the physical environment, or heterologous sequence, or sequence that serves to stop transcription or translation at the site of the DSB, or sequence having secondary structure (e. g., double-stranded stems or stem-loops) or than encodes a transcript having secondary structure (e. g., double-stranded RNA that is cleavable by a Dicer-type ribonuclease).

[0009] In another aspect, the invention provides a polynucleotide for disrupting gene expression, wherein the polynucleotide is double-stranded and includes at least 18 contiguous base-pairs and encoding at least one stop codon in each possible reading frame on each strand, or is single-stranded and includes at least 11 contiguous nucleotides; and wherein the polynucleotide encodes at least one stop codon in each possible reading frame on each strand. In embodiments, the polynucleotide is a double-stranded DNA (dsDNA) or a double-stranded DNA/RNA hybrid molecule including at least 18 contiguous base-pairs and encoding at least one stop codon in each possible reading frame on either strand. In embodiments, the polynucleotide is a single-stranded DNA or a single-stranded DNA/RNA hybrid molecule including at least 11 contiguous nucleotides and encoding at least one stop codon in each possible reading frame on the strand. Such a polynucleotide is especially useful in methods disclosed herein, wherein, when a sequence encoded by the polynucleotide is integrated or inserted into a genome at the site of a DSB in a sequence of interest (such as a protein-coding gene), the sequence of the heterologously inserted polynucleotide serves to stop translation of the transcript containing the sequence of interest and the heterologously inserted polynucleotide sequence. Embodiments of the polynucleotide include those wherein the polynucleotide includes one or more chemical modifications or labels, e. g., at least one phosphorothioate modification.

[0010] In another aspect, the invention provides a method of identifying the locus of at least one double-stranded break (DSB) in genomic DNA in a cell (such as a plant cell) including the genomic DNA, wherein the method includes the steps of: (a) contacting the genomic DNA having a DSB with a polynucleotide (such as a double-stranded DNA, a single-stranded DNA, a single-stranded DNA/RNA hybrid, or a double-stranded DNA/RNA hybrid) donor molecule, wherein the polynucleotide donor molecule is capable of being integrated (or having its sequence integrated) at the DSB (preferably by non-homologous end-joining (NHEJ)) and has a length of between about 18 to about 300 base-pairs (or nucleotides, if single-stranded), or between about 30 to about 100 base-pairs (or nucleotides, if single-stranded); wherein a sequence encoded by the polynucleotide donor molecule, if integrated at the DSB, forms a heterologous insertion; and (b) using at least part of the sequence of the polynucleotide molecule as a target for PCR primers to allow amplification of DNA in the locus of the DSB. In a related aspect, the invention provides a method of identifying the locus of double-stranded breaks (DSBs) in genomic DNA in a pool of cells (such as plant cells or plant protoplasts), wherein the pool of cells includes cells having genomic DNA with a sequence encoded by a polynucleotide donor molecule inserted at the locus of the double stranded breaks; wherein the polynucleotide donor molecule is capable of being integrated (or having its sequence integrated) at the DSB and has a length of between about 18 to about 300 base-pairs (or nucleotides, if single-stranded), or between about 30 to about 100 base-pairs (or nucleotides, if single-stranded); wherein a sequence encoded by the polynucleotide donor molecule, if integrated at the DSB, forms a heterologous insertion; and wherein the sequence of the polynucleotide donor molecule is used as a target for PCR primers to allow amplification of DNA in the region of the double-stranded breaks. In embodiments, the pool of cells is a population of plant cells or plant protoplasts, wherein at least some of the cells contain multiple or different DSBs in the genome, each of which can be introduced into the genome by a different guide RNA.

[0011] In another aspect, the invention provides a method of identifying the nucleotide sequence of a locus in the genome that is associated with a phenotype, the method including the steps of: (a) providing to a population of cells having the genome: (i) multiple different guide RNAs (gRNAs) to induce multiple different double strand breaks (DSBs) in the genome, wherein each DSB is produced by an RNA-guided nuclease guided to a locus on the genome by one of the gRNAs, and (ii) polynucleotide (such as double-stranded DNA, single-stranded DNA, single-stranded DNA/RNA hybrid, and double-stranded DNA/RNA hybrid) donor molecules having a defined nucleotide sequence, wherein the polynucleotide donor molecules are capable of being integrated (or having their sequence integrated) into the DSBs by non-homologous end-joining (NHEJ); whereby when at least a sequence encoded by some of the polynucleotide donor molecules are inserted into at least some of the DSBs, a genetically heterogeneous population of cells is produced; (b) selecting from the genetically heterogeneous population of cells a subset of cells that exhibit a phenotype of interest; (c) using a pool of PCR primers that bind to at least part of the nucleotide sequence of the polynucleotide donor molecules to amplify from the subset of cells DNA from the locus of a DSB into which one of the polynucleotide donor molecules has been inserted; and (d) sequencing the amplified DNA to identify the locus associated with the phenotype of interest. In embodiments of the method, the gRNA is provided as a polynucleotide, or as a ribonucleoprotein including the gRNA and the RNA-guided nuclease. Related aspects include the cells produced by the method and pluralities, arrays, and genetically heterogeneous populations of such cells, as well as the subset of cells in which the locus associated with the phenotype has been identified, and callus, seedlings, plantlets, and plants and their seeds, grown or regenerated from such cells.

[0012] In another aspect, the invention provides a method of modifying a plant cell by creating a plurality of targeted modifications in the genome of the plant cell, wherein the method comprises contacting the genome with one or more targeting agents, wherein the one or more agents comprise or encode predetermined peptide or nucleic acid sequences, wherein the predetermined peptide or nucleic acid sequences bind preferentially at or near predetermined target sites within the plant genome, and wherein the binding directs or facilitates the generation of the plurality of targeted modifications within the genome; wherein the plurality of targeted modifications occurs without an intervening step of separately identifying an individual modification and without a step of separately selecting for the occurrence of an individual modification among the plurality of targeted modifications mediated by the targeting agents; and wherein the targeted modifications alter at least one trait of the plant cell, or at least one trait of a plant comprising the plant cell, or at least one trait of a plant grown from the plant cell, or result in a detectable phenotype in the modified plant cell; and wherein at least two of the targeted modifications are insertions of predetermined sequences encoded by one or more polynucleotide donor molecules, and wherein at least one of the polynucleotide donor molecules lacks homology to the genome sequences adjacent to the site of insertion. In a related embodiment, at least one of the polynucleotide donor molecules used in the method is a single stranded DNA molecule, a single stranded RNA molecule, a single stranded DNA-RNA hybrid molecule, or a duplex RNA-DNA molecule. In another related embodiment, wherein the modified plant cell of the method is a meristematic cell, embryonic cell, or germline cell. In yet another related embodiment, the methods described in this paragraph, when practiced repeatedly or on a pool of cells, result in an efficiency of at least 1%, e.g., at least 2%, 5%, 7%, 10%, 15%, 20%, 25%, 30%, 35% or more, wherein said efficiency is determined, e.g., by dividing the number of successfully targeted cells by the total number of cells targeted.

[0013] In another embodiment, the invention provides a method of modifying a plant cell by creating a plurality of targeted modifications in the genome of the plant cell, comprising: contacting the genome with one or more targeting agents, wherein the one or more agents comprise or encode predetermined peptide or nucleic acid sequences, wherein the predetermined peptide or nucleic acid sequences bind preferentially at or near predetermined target sites within the plant genome, and wherein the binding directs or facilitates the generation of the plurality of targeted modifications within the genome; wherein the plurality of targeted modifications occurs without an intervening step of separately identifying an individual modification and without a step of separately selecting for the occurrence of an individual modification among the plurality of targeted modifications mediated by the targeting agents; and wherein the targeted modifications improve at least one trait of the plant cell, or at least one trait of a plant comprising the plant cell, or at least one trait of a plant grown from the plant cell, or result in a detectable phenotype in the modified plant cell; and wherein at least one of the targeted modifications is an insertion of a predetermined sequence encoded by one or more polynucleotide donor molecules, and wherein at least one of the polynucleotide donor molecules is a single stranded DNA molecule, a single stranded RNA molecule, a single stranded DNA-RNA hybrid molecule, or a duplex RNA-DNA molecule. In a related embodiment, at least one of the polynucleotide donor molecules used in the method lacks homology to the genome sequences adjacent to the site of insertion. In another related embodiment, the modified plant cell is a meristematic cell, embryonic cell, or germline cell. In yet another related embodiment, repetition of the methods described in this paragraph result in an efficiency of at least 1%, e.g., at least 2%, 5%, 7%, 10%, 15%, 20%, 25%, 30%, 35% or more, wherein said efficiency is determined by dividing the number of successfully targeted cells by the total number of cells targeted. In a related embodiment, the targeted plant cell has a ploidy of 2n, with n being a value selected from the group consisting of 0.5, 1, 1.5, 2, 2.5, 3, 3.5, 4, 5, and 6, wherein the method generates 2n targeted modifications at 2n loci of the predetermined target sites within the plant cell genome; and wherein 2n of the targeted modifications are insertions or creations of predetermined sequences encoded by one or more polynucleotide donor molecules.

[0014] In another embodiment, the invention provides a method of modifying a plant cell by creating a plurality of targeted modifications in the genome of the plant cell, comprising: contacting the genome with one or more targeting agents, wherein the one or more agents comprise or encode predetermined peptide or nucleic acid sequences, wherein the predetermined peptide or nucleic acid sequences bind preferentially at or near predetermined target sites within the plant genome, and wherein the binding directs the generation of the plurality of targeted modifications within the genome; wherein the plurality of modifications occurs without an intervening step of separately identifying an individual modification and without a step of separately selecting for the occurrence of an individual modification among the plurality of targeted modifications mediated by the targeting agents; wherein the targeted modifications improve at least one trait of the plant cell, or at least one trait of a plant comprising the plant cell, or at least one trait of a plant or seed obtained from the plant cell, or result in a detectable phenotype in the modified plant cell; and wherein the modified plant cell is a meristematic cell, embryonic cell, or germline cell. In a related embodiment, at least one of the targeted modifications is an insertion of a predetermined sequence encoded by one or more polynucleotide donor molecules, and wherein at least one of the polynucleotide donor molecules is a single stranded DNA molecule, a single stranded RNA molecule, a single stranded DNA-RNA hybrid molecule, or a duplex RNA-DNA molecule. In yet another related embodiment, at least one of the polynucleotide donor molecules lacks homology to the genome sequences adjacent to the site of insertion. In yet another embodiment related to the methods of this paragraph, repetition of the method results in an efficiency of at least 1%, e.g., at least 2%, 5%, 7%, 10%, 15%, 20%, 25%, 30%, 35% or more, wherein said efficiency is determined by dividing the number of successfully targeted cells by the total number of cells targeted.

[0015] In another embodiment, the invention provides a method of modifying a soybean plant cell by creating a plurality of targeted modifications in the genome of the plant cell, comprising: contacting the genome with one or more targeting agents, wherein the one or more agents comprise or encode predetermined peptide or nucleic acid sequences, wherein the predetermined peptide or nucleic acid sequences bind preferentially at or near predetermined target sites within the plant genome, and wherein the binding directs the generation of the plurality of targeted modifications within the genome; wherein the plurality of modifications occurs without an intervening step of separately identifying an individual modification and without a step of separately selecting for the occurrence of an individual modification among the plurality of targeted modifications mediated by the targeting agents; and wherein the targeted modifications improve at least one trait of the plant cell, or at least one trait of a plant comprising the plant cell, or at least one trait of a plant or seed obtained from the plant cell, or result in a detectable phenotype in the modified plant cell; and wherein repetition of the aforementioned steps results in an efficiency of at least 1%, e.g., at least 2%, 5%, 7%, 10%, 15%, 20%, 25%, 30%, 35% or more, wherein said efficiency is determined by dividing the number of successfully targeted cells by the total number of cells targeted. In a related embodiment, the modified plant cell is a meristematic cell, embryonic cell, or germline cell. In another related embodiment, at least one of the targeted modifications is an insertion of a predetermined sequence encoded by one or more polynucleotide donor molecules, and wherein at least one of the polynucleotide donor molecules is a single stranded DNA molecule, a single stranded RNA molecule, a single stranded DNA-RNA hybrid molecule, or a duplex RNA-DNA molecule. In yet another related embodiment of the methods of this paragraph, at least one of the polynucleotide donor molecules used in the method lacks homology to the genome sequences adjacent to the site of insertion.

[0016] In various embodiments of the methods described above, at least one of the targeted modifications is an insertion between 3 and 400 nucleotides in length, between 10 and 350 nucleotides in length, between 18 and 350 nucleotides in length, between 18 and 200 nucleotides in length, between 10 and 150 nucleotides in length, or between 11 and 100 nucleotides in length. In certain, embodiments, two of the targeted modifications are insertions between 10 and 350 nucleotides in length, between 18 and 350 nucleotides in length, between 18 and 200 nucleotides in length, between 10 and 150 nucleotides in length, or between 11 and 100 nucleotides in length.

[0017] In another variation of the methods described above, at least two insertions are made, and at least one of the insertions is an upregulatory sequence. In yet another variation, the targeted modification methods described above insert or create at least one transcription factor binding site. In yet another variation of the methods described above, the insertion or insertions of predetermined sequences into the plant genome are accompanied by the deletion of sequences from the plant genome.

[0018] In yet another embodiment of the targeted modification methods described above, the methods further comprise obtaining a plant from the modified plant cell and breeding the plant. In yet another embodiment, the methods described above comprise a step of introducing additional genetic or epigenetic changes into the modified plant cell or into a plant grown from the modified plant cell.

[0019] In an embodiment of the targeted modification methods described above, at least two targeted insertions are made and the targeted insertions independently up- or down-regulate the expression of two or more distinct genes. For example, a targeted insertion may increase expression at least 10%, 15%, 20%, 25%, 30%, 35%, 40%, 50%, 60%, 70%, 80%, 90%, 95%, 100% or greater, e.g., at least a 2-fold, 5-fold, 10-fold, 20-fold, 30-fold, 40-fold, 50-fold change, 100-fold or even 1000-fold change or more. In some embodiments, expression is increased between 10-100%; between 2-fold and 5-fold; between 2 and 10-fold; between 10-fold and 50-fold; between 10-fold and a 100-fold; between 100-fold and 1000-fold; between 1000-fold and 5,000-fold; between 5,000-fold and 10,000 fold. In some embodiments, a targeted insertion may decrease expression by at least 1%, 5%, 10%, 15%, 20%, 25%, 30%, 35%, 40%, 50%, 60%, 70%, 80%, 90%, 95%, 99% or more.

[0020] In yet another embodiment of the targeted insertion methods described above, the donor polynucleotide is tethered to a crRNA by a covalent bond, a non-covalent bond, or a combination of covalent and non-covalent bonds. In a related embodiment, the invention provides a composition for targeting a genome comprising a donor polynucleotide tethered to a cRNA by a covalent bond, a non-covalent bond, or a combination of covalent and non-covalent bonds.

[0021] In another embodiment of the targeted modification methods described above, the loss of epigenetic marks after modifying occurs in less than 0.1%, 0.08%, 0.05%, 0.02%, or 0.01% of the genome. In yet another embodiment of the targeted modification methods described above, the genome of the modified plant cell is more than 99%, e.g., more than 99.5% or more than 99.9% identical to the genome of the parent cell.

[0022] In yet another embodiment of the targeted modification methods described above, at least one of the targeted modifications is an insertion and at least one insertion is in a region of the genome that is recalcitrant to meiotic or mitotic recombination.

[0023] In certain embodiments of the plant cell genome targeting methods described above, the plant cell is a member of a pool of cells being targeted. In related embodiments, the modified cells within the pool are characterized by sequencing after targeting.

[0024] The invention also provides modified soybean plant cells comprising at least two separately targeted insertions in its genome, wherein the insertions are determined relative to a parent plant cell, and wherein the modified plant cell is devoid of mitotically or meiotically generated genetic or epigenetic changes relative to the parent plant cell. In certain embodiments, these plant cells are obtained using the multiplex targeted insertion methods described above. In certain embodiments, the modified plant cells comprise at least two separately targeted insertions, wherein the genome of the modified plant cell is at least 95%, at least 96%, at least 97%, at least 98%, at least 99%, at least 99.5%, at least 99.9%, or at least 99.99% identical to the parent cell, taking all genetic or epigenetic changes into account.

[0025] While the introgression of certain traits and transgenes into plants has been successful, achieving a homozygous modified plant in one step (i.e., modifying all targeted loci simultaneously) has not been previously described. Plants homozygous for, e.g., targeted insertions could only be obtained by further crossing and/or techniques involving double-haploids. These techniques are not only time consuming and laborious, they also lead to plants which deviate from the original plant not only for the targeted insertion but also for other changes as a consequence of the techniques employed to enable homozygosity. As such changes could have unintended and unpredictable consequences and may require further testing or screening, they are clearly undesired in a breeding process. In certain embodiments, the invention provides methods of making a targeted mutation and/or targeted insertion in all of the 2n targeted loci in a plant genome in one step. In embodiments, the two or more loci are alleles of a given sequence of interest; when all alleles of a given gene or sequence of interest are modified in the same way, the result is homozygous modification of the gene. For example, embodiments of the method enable targeted modification of both alleles of a gene in a diploid (2n ploidy, where n=1) plant, or targeted modification of all three alleles in a triploid (2n ploidy, where n=1.5) plant, or targeted modification of all six alleles of a gene in a hexaploid (2n ploidy, where n=3) plant.

[0026] The invention also provides modified plant cells resulting from any of the claimed methods described, as well as recombinant plants grown from those modified plant cells.

[0027] In some embodiments, the invention provides a method of manufacturing a processed plant product, comprising: (a) modifying a plant cell according to any of the targeted methods described above; (b) growing a modified plant from said plant cell, and (c) processing the modified plant into a processed product, thereby manufacturing a processed plant product. In related embodiments, the processed product may be meal, oil, juice, sugar, starch, fiber, an extract, wood or wood pulp, flour, cloth or some other commodity plant product. The invention also provides a method of manufacturing a plant product, comprising (a) modifying a plant cell according to any of the targeted methods described above, (b) growing an modified plant from said plant cell, and (c) harvesting a product of the modified plant, thereby manufacturing a plant product. In related embodiments, the plant product is a product may be leaves, fruit, vegetables, nuts, seeds, oil, wood, flowers, cones, branches, hay, fodder, silage, stover, straw, pollen, or some other harvested commodity product. In further related embodiments, the processed products and harvested products are packaged.

### DETAILED DESCRIPTION OF THE INVENTION

### Definitions

[0028] Unless otherwise stated, nucleic acid sequences in the text of this specification are given, when read from left to right, in the 5′ to 3′ direction. Nucleic acid sequences may be provided as DNA or as RNA, as specified; disclosure of one necessarily defines the other, as well as necessarily defines the exact complements, as is known to one of ordinary skill in the art. Where a term is provided in the singular, the inventors also contemplate aspects of the invention described by the plural of that term.

[0029] By “polynucleotide” is meant a nucleic acid molecule containing multiple nucleotides and refers to “oligonucleotides” (defined here as a polynucleotide molecule of between 2-25 nucleotides in length) and polynucleotides of 26 or more nucleotides. Polynucleotides are generally described as single- or double-stranded. Where a polynucleotide contains double-stranded regions formed by intra- or intermolecular hybridization, the length of each double-stranded region is conveniently described in terms of the number of base pairs. Aspects of this invention include the use of polynucleotides or compositions containing polynucleotides; embodiments include one or more oligonucleotides or polynucleotides or a mixture of both, including single- or double-stranded RNA or single- or double-stranded DNA or single- or double-stranded DNA/RNA hybrids or chemically modified analogues or a mixture thereof. In various embodiments, a polynucleotide (such as a single-stranded DNA/RNA hybrid or a double-stranded DNA/RNA hybrid) includes a combination of ribonucleotides and deoxyribonucleotides (e. g., synthetic polynucleotides consisting mainly of ribonucleotides but with one or more terminal deoxyribonucleotides or synthetic polynucleotides consisting mainly of deoxyribonucleotides but with one or more terminal dideoxyribonucleotides), or includes non-canonical nucleotides such as inosine, thiouridine, or pseudouridine. In embodiments, the polynucleotide includes chemically modified nucleotides (see, e. g., Verma and Eckstein (1998) Annu. Rev. Biochem., 67:99-134); for example, the naturally occurring phosphodiester backbone of an oligonucleotide or polynucleotide can be partially or completely modified with phosphorothioate, phosphorodithioate, or methylphosphonate internucleotide linkage modifications; modified nucleoside bases or modified sugars can be used in oligonucleotide or polynucleotide synthesis; and oligonucleotides or polynucleotides can be labelled with a fluorescent moiety (e. g., fluorescein or rhodamine or a fluorescence resonance energy transfer or FRET pair of chromophore labels) or other label (e. g., biotin or an isotope). Modified nucleic acids, particularly modified RNAs, are disclosed in U.S. Pat. No. 9,464,124, incorporated by reference in its entirety herein. For some polynucleotides (especially relatively short polynucleotides, e. g., oligonucleotides of 2-25 nucleotides or base-pairs, or polynucleotides of about 25 to about 300 nucleotides or base-pairs), use of modified nucleic acids, such as locked nucleic acids (“LNAs”), is useful to modify physical characteristics such as increased melting temperature (Tₘ) of a polynucleotide duplex incorporating DNA or RNA molecules that contain one or more LNAs; see, e. g., You et al. (2006) Nucleic Acids Res., 34:1-11 (e60), doi:10.1093/nar/gkl175.

[0030] In the context of the genome targeting methods described herein, the phrase “contacting a genome” with an agent means that an agent responsible for effecting the targeted genome modification (e.g., a break, a deletion, a rearrangement, or an insertion) is delivered to the interior of the cell so the directed mutagenic action can take place.

[0031] In the context of discussing or describing the ploidy of a plant cell, the “n” (as in “a ploidy of 2n”) refers to the number of homologous pairs of chromosomes, and is typically equal to the number of homologous pairs of gene loci on all chromosomes present in the cell.

[0032] The term “inbred variety” refers to a genetically homozygous or substantially homozygous population of plants that preferably comprises homozygous alleles at about 95%, preferably 98.5% or more of its loci. An inbred line can be developed through inbreeding (i e., several cycles of selfing, more preferably at least 5, 6, 7 or more cycles of selfing) or doubled haploidy resulting in a plant line with a high uniformity. Inbred lines breed true, e.g., for one or more or all phenotypic traits of interest. An “inbred”, “inbred individual, or “inbred progeny” is an individual sampled from an inbred line.

[0033] “F1, F2, F3, etc.” refers to the consecutive related generations following a cross between two parent plants or parent lines. The plants grown from the seeds produced by crossing two plants or lines is called the F1 generation. Selfing the F1 plants results in the F2 generation, etc. “F1 hybrid” plant (or F1 hybrid seed) is the generation obtained from crossing two inbred parent lines. Thus, F1 hybrid seeds are seeds from which F1 hybrid plants grow. F1 hybrids are more vigorous and higher yielding, due to heterosis.

[0034] Hybrid seed: Hybrid seed is seed produced by crossing two different inbred lines (i.e. a female inbred line with a male inbred). Hybrid seed is heterozygous over a majority of its alleles.

[0035] As used herein, the term “variety” refers to a group of similar plants that by structural or genetic features and/or performance can be distinguished from other varieties within the same species.

[0036] The term “cultivar” (for cultivated variety) is used herein to denote a variety that is not normally found in nature but that has been created by humans, i.e., having a biological status other than a “wild” status, which “wild” status indicates the original non-cultivated, or natural state of a plant or accession. The term “cultivar” includes, but is not limited to, semi-natural, semi-wild, weedy, traditional cultivar, landrace, breeding material, research material, breeder's line, synthetic population, hybrid, founder stock/base population, inbred line (parent of hybrid cultivar), segregating population, mutant/genetic stock, and advanced/improved cultivar. The term “elite background” is used herein to indicate the genetic context or environment of a targeted mutation of insertion.

[0037] The term “dihaploid line” refers to stable inbred lines issued from another culture. Some pollen grains (haploid) cultivated on specific medium and circumstances can develop plantlets containing n chromosomes. These plantlets are then “double” and contain 2n chromosomes. The progeny of these plantlets are named “dihaploid” and are essentially not segregating any more (i.e., they are stable).

[0038] “F1 hybrid” plant (or F1 hybrid seed) is the generation obtained from crossing two inbred parent lines. Thus, F1 hybrid seeds are seeds from which F1 hybrid plants grow. F1 hybrids are more vigorous and higher yielding, due to heterosis. Inbred lines are essentially homozygous at most loci in the genome. A “plant line” or “breeding line” refers to a plant and its progeny. “F1”, “F2”, “F3”, etc.” refers to the consecutive related generations following a cross between two parent plants or parent lines. The plants grown from the seeds produced by crossing two plants or lines is called the F1 generation. Selfing the F1 plants results in the F2 generation, etc.

[0039] The term “allele(s)” means any of one or more alternative forms of a gene at a particular locus, all of which alleles relate to one trait or characteristic at a specific locus. In a diploid cell of an organism, alleles of a given gene are located at a specific location, or locus (loci plural), on a chromosome. One allele is present on each chromosome of the pair of homologous chromosomes. A diploid plant species may comprise a large number of different alleles at a particular locus. These may be identical alleles of the gene (homozygous) or two different alleles (heterozygous).

[0040] The term “locus” (loci plural) means a specific place or places or a site on a chromosome where for example a QTL, a gene or genetic marker is found.

[0041] The spontaneous (non-targeted) mutation rate for a single base pair is estimated to be 7×10⁻⁹ per bp per generation. Assuming an estimated 30 replications per generation, this leads to an estimated spontaneous (non-targeted) mutation rate of 2×10⁻¹⁰ mutations per base pair per replication event.

### Tools and Methods for Multiplex Editing

[0042] CRISPR technology for editing the genes of eukaryotes is disclosed in U. S. Patent Application Publications 2016/0138008A1 and US2015/0344912A1, and in U.S. Pat. Nos. 8,697,359, 8,771,945, 8,945,839, 8,999,641, 8,993,233, 8,895,308, 8,865,406, 8,889,418, 8,871,445, 8,889,356, 8,932,814, 8,795,965, and 8,906,616. Cpf1 endonuclease and corresponding guide RNAs and PAM sites are disclosed in U. S. Patent Application Publication 2016/0208243 A1. Other CRISPR nucleases useful for editing genomes include C2c1 and C2c3 (see Shmakov et al. (2015) Mol. Cell, 60:385-397) and CasX and CasY (see Burstein et al. (2016) Nature, doi:10.1038/nature21059). Plant RNA promoters for expressing CRISPR guide RNA and plant codon-optimized CRISPR Cas9 endonuclease are disclosed in International Patent Application PCT/US2015/018104 (published as WO 2015/131101 and claiming priority to U.S. Provisional Patent Application 61/945,700). Methods of using CRISPR technology for genome editing in plants are disclosed in in U. S. Patent Application Publications US 2015/0082478A1 and US 2015/0059010A1 and in International Patent Application PCT/US2015/038767 A1 (published as WO 2016/007347 and claiming priority to U.S. Provisional Patent Application 62/023,246).

[0043] CRISPR (Clustered Regularly Interspaced Short Palindromic Repeats)/Cas (CRISPR-associated) systems, or CRISPR systems, are adaptive defense systems originally discovered in bacteria and archaea. CRISPR systems use RNA-guided nucleases termed CRISPR-associated or “Cas” endonucleases (e. g., Cas9 or Cpf1) to cleave foreign DNA. In a typical CRISPR/Cas system, a Cas endonuclease is directed to a target nucleotide sequence (e. g., a site in the genome that is to be sequence-edited) by sequence-specific, non-coding “guide RNAs” that target single- or double-stranded DNA sequences. In microbial hosts, CRISPR loci encode both Cas endonucleases and “CRISPR arrays” of the non-coding RNA elements that determine the specificity of the CRISPR-mediated nucleic acid cleavage.

[0044] Three classes (I-III) of CRISPR systems have been identified across a wide range of bacterial hosts. The well characterized class II CRISPR systems use a single Cas endonuclease (rather than multiple Cas proteins). One class II CRISPR system includes a type II Cas endonuclease such as Cas9, a CRISPR RNA (“crRNA”), and a trans-activating crRNA (“tracrRNA”). The crRNA contains a “guide RNA”, typically a 20-nucleotide RNA sequence that corresponds to (i. e., is identical or nearly identical to, or alternatively is complementary or nearly complementary to) a 20-nucleotide target DNA sequence. The crRNA also contains a region that binds to the tracrRNA to form a partially double-stranded structure which is cleaved by RNase III, resulting in a crRNA/tracrRNA hybrid. The crRNA/tracrRNA hybrid then directs the Cas9 endonuclease to recognize and cleave the target DNA sequence.

[0045] The target DNA sequence must generally be adjacent to a “protospacer adjacent motif” (“PAM”) that is specific for a given Cas endonuclease; however, PAM sequences are short and relatively non-specific, appearing throughout a given genome. CRISPR endonucleases identified from various prokaryotic species have unique PAM sequence requirements; examples of PAM sequences include 5′-NGG (Streptococcus pyogenes), 5′-NNAGAA (Streptococcus thermophilus CRISPR1), 5′-NGGNG (Streptococcus thermophilus CRISPR3), 5′-NNGRRT or 5′-NNGRR (Staphylococcus aureus Cas9, SaCas9), and 5′-NNNGATT (Neisseria meningitidis). Some endonucleases, e. g., Cas9 endonucleases, are associated with G-rich PAM sites, e. g., 5′-NGG, and perform blunt-end cleaving of the target DNA at a location 3 nucleotides upstream from (5′ from) the PAM site.

[0046] Another class II CRISPR system includes the type V endonuclease Cpf1, which is a smaller endonuclease than is Cas9; examples include AsCpf1 (from Acidaminococcus sp.) and LbCpf1 (from Lachnospiraceae sp.). Cpf1-associated CRISPR arrays are processed into mature crRNAs without the requirement of a tracrRNA; in other words, a Cpf1 system requires only the Cpf1 nuclease and a crRNA to cleave the target DNA sequence. Cpf1 endonucleases, are associated with T-rich PAM sites, e. g., 5′-TTN. Cpf1 can also recognize a 5′-CTA PAM motif. Cpf1 cleaves the target DNA by introducing an offset or staggered double-strand break with a 4- or 5-nucleotide 5′ overhang, for example, cleaving a target DNA with a 5-nucleotide offset or staggered cut located 18 nucleotides downstream from (3′ from) from the PAM site on the coding strand and 23 nucleotides downstream from the PAM site on the complimentary strand; the 5-nucleotide overhang that results from such offset cleavage allows more precise genome editing by DNA insertion by homologous recombination than by insertion at blunt-end cleaved DNA. See, e. g., Zetsche et al. (2015) Cell, 163:759-771. Other CRISPR nucleases useful in methods and compositions of the invention include C2c1 and C2c3 (see Shmakov et al. (2015) Mol. Cell, 60:385-397). Like other CRISPR nucleases, C2c1 from Alicyclobacillus acidoterrestris (AacC2c1; amino acid sequence with accession ID TOD7A2, deposited on-line at www[dot]ncbi[dot]nlm[dot]nih[dot]gov/protein/1076761101) requires a guide RNA and PAM recognition site; C2c1 cleavage results in a staggered seven-nucleotide DSB in the target DNA (see Yang et al. (2016) Cell, 167:1814-1828.e12) and is reported to have high mismatch sensitivity, thus reducing off-target effects (see Liu et al. (2016) Mol. Cell, available on line at dx[dot]doi[dot]org/10[dot]1016/j[dot]molcel[dot]2016 [dot]11.040). Yet other CRISPR nucleases include nucleases identified from the genomes of uncultivated microbes, such as CasX and CasY (e. g., a CRISPR-associated protein CasY from an uncultured Parcubacteria group bacterium, amino acid sequence with accession ID APG80656, deposited on-line at www[dot]ncbi[dot]nlm[dot]nih[dot]gov/protein/APG80656.1]); see Burstein et al. (2016) Nature, doi:10.1038/nature21059.

[0047] For the purposes of gene editing, CRISPR arrays can be designed to contain one or multiple guide RNA sequences corresponding to a desired target DNA sequence; see, for example, Cong et al. (2013) Science, 339:819-823; Ran et al. (2013) Nature Protocols, 8:2281-2308. At least 16 or 17 nucleotides of gRNA sequence are required by Cas9 for DNA cleavage to occur; for Cpf1 at least 16 nucleotides of gRNA sequence are needed to achieve detectable DNA cleavage and at least 18 nucleotides of gRNA sequence were reported necessary for efficient DNA cleavage in vitro; see Zetsche et al. (2015) Cell, 163:759-771. In practice, guide RNA sequences are generally designed to have a length of between 17-24 nucleotides (frequently 19, 20, or 21 nucleotides) and exact complementarity (i. e., perfect base-pairing) to the targeted gene or nucleic acid sequence; guide RNAs having less than 100% complementarity to the target sequence can be used (e. g., a gRNA with a length of 20 nucleotides and between 1-4 mismatches to the target sequence) but can increase the potential for off-target effects. The design of effective guide RNAs for use in plant genome editing is disclosed in U. S. Patent Application Publication 2015/0082478 A1, the entire specification of which is incorporated herein by reference. More recently, efficient gene editing has been achieved using a chimeric “single guide RNA” (“sgRNA”), an engineered (synthetic) single RNA molecule that mimics a naturally occurring crRNA-tracrRNA complex and contains both a tracrRNA (for binding the nuclease) and at least one crRNA (to guide the nuclease to the sequence targeted for editing); see, for example, Cong et al. (2013) Science, 339:819-823; Xing et al. (2014) BMC Plant Biol., 14:327-340. Chemically modified sgRNAs have been demonstrated to be effective in genome editing; see, for example, Hendel et al. (2015) Nature Biotech., 985-991.

[0048] CRISPR-type genome editing has value in various aspects of agriculture research and development. CRISPR elements, i.e., CRISPR endonucleases and CRISPR single-guide RNAs, are useful in effecting genome editing without remnants of the CRISPR elements or selective genetic markers occurring in progeny. Alternatively, genome-inserted CRISPR elements are useful in plant lines adapted for multiplex genetic screening and breeding. For instance, a plant species can be created to express one or more of a CRISPR endonuclease such as a Cas9- or a Cpf1-type endonuclease or combinations with unique PAM recognition sites. Cpf1 endonuclease and corresponding guide RNAs and PAM sites are disclosed in U. S. Patent Application Publication 2016/0208243 A1, which is incorporated herein by reference for its disclosure of DNA encoding Cpf1 endonucleases and guide RNAs and PAM sites. Introduction of one or more of a wide variety of CRISPR guide RNAs that interact with CRISPR endonucleases integrated into a plant genome or otherwise provided to a plant is useful for genetic editing for providing desired phenotypes or traits, for trait screening, or for trait introgression. Multiple endonucleases can be provided in expression cassettes with the appropriate promoters to allow multiple genome editing in a spatially or temporally separated fashion in either in chromosome DNA or episome DNA.

[0049] Whereas wild-type Cas9 generates double-strand breaks (DSBs) at specific DNA sequences targeted by a gRNA, a number of CRISPR endonucleases having modified functionalities are available, for example: (1) a “nickase” version of Cas9 generates only a single-strand break; (2) a catalytically inactive Cas9 (“dCas9”) does not cut the target DNA but interferes with transcription; (3) dCas9 on its own or fused to a repressor peptide can repress gene expression; (4) dCas9 fused to an activator peptide can activate or increase gene expression; (5) dCas9 fused to FokI nuclease (“dCas9-FokI”) can be used to generate DSBs at target sequences homologous to two gRNAs; and (6) dCas9 fused to histone-modifying enzymes (e. g., histone acetyltransferases, histone methyltransferases, histone deacetylases, and histone demethylases) can be used to alter the epigenome in a site-specific manner, for example, by changing the methylation or acetylation status at a particular locus. See, e. g., the numerous CRISPR/Cas9 plasmids disclosed in and publicly available from the Addgene repository (Addgene, 75 Sidney St., Suite 550A, Cambridge, Mass. 02139; addgene[dot]org/crispr/). A “double nickase” Cas9 that introduces two separate double-strand breaks, each directed by a separate guide RNA, is described as achieving more accurate genome editing by Ran et al. (2013) Cell, 154:1380-1389.

[0050] In some embodiments, the methods of targeted modification described herein provide a means for avoiding unwanted epigenetic losses that can arise from tissue culturing modified plant cells (see, e.g., Stroud et al. eLife 2013; 2:e00354). Using the methods described herein in the absence of tissue culture, a loss of epigenetic marking may occur in less than 0.01% of the genome. This contrasts with results obtained with plants where tissue culture methods may result in losses of DNA methylation that occur, on average, as determined by bisulfate sequencing, at 1344 places that are on average 334 base pairs long, which means a loss of DNA methylation at an average of 0.1% of the genome (Stroud, 2013). In other words, the loss in marks using the targeted modification techniques described herein without tissue culture is 10 times lower than the loss observed when tissue culture techniques are relied on. In certain embodiments of the novel modified plant cells described herein, the modified plant cell or plant does not have significant losses of methylation compared to a non-modified parent plant cell or plant; in other words, the methylation pattern of the genome of the modified plant cell or plant is not greatly different from the methylation pattern of the genome of the parent plant cell or plant; in embodiments, the difference between the methylation pattern of the genome of the modified plant cell or plant and that of the parent plant cell or plant is less than 0.1%, 0.05%, 0.02%, or 0.01% of the genome, or less than 0.005% of the genome, or less than 0.001% of the genome (see, e. g., Stroud et al. (2013) eLife 2:e00354; doi:10.7554/eLife.00354).

[0051] CRISPR technology for editing the genes of eukaryotes is disclosed in U.S. Patent Application Publications 2016/0138008A1 and US2015/0344912A1, and in U.S. Pat. Nos. 8,697,359, 8,771,945, 8,945,839, 8,999,641, 8,993,233, 8,895,308, 8,865,406, 8,889,418, 8,871,445, 8,889,356, 8,932,814, 8,795,965, and 8,906,616. Cpf1 endonuclease and corresponding guide RNAs and PAM sites are disclosed in U.S. Patent Application Publication 2016/0208243 A1. Plant RNA promoters for expressing CRISPR guide RNA and plant codon-optimized CRISPR Cas9 endonuclease are disclosed in International Patent Application PCT/US2015/018104 (published as WO 2015/131101 and claiming priority to U.S. Provisional Patent Application 61/945,700). Methods of using CRISPR technology for genome editing in plants are disclosed in in U.S. Patent Application Publications US 2015/0082478A1 and US 2015/0059010A1 and in International Patent Application PCT/US2015/038767 A1 (published as WO 2016/007347 and claiming priority to U.S. Provisional Patent Application 62/023,246). All of the patent publications referenced in this paragraph are incorporated herein by reference in their entirety.

[0052] In some embodiments, one or more vectors driving expression of one or more polynucleotides encoding elements of a genome-editing system (e. g., encoding a guide RNA or a nuclease) are introduced into a plant cell or a plant protoplast, whereby these elements, when expressed, result in alteration of a target nucleotide sequence. In embodiments, a vector comprises a regulatory element such as a promoter operably linked to one or more polynucleotides encoding elements of a genome-editing system. In such embodiments, expression of these polynucleotides can be controlled by selection of the appropriate promoter, particularly promoters functional in a plant cell; useful promoters include constitutive, conditional, inducible, and temporally or spatially specific promoters (e. g., a tissue specific promoter, a developmentally regulated promoter, or a cell cycle regulated promoter). In embodiments, the promoter is operably linked to nucleotide sequences encoding multiple guide RNAs, wherein the sequences encoding guide RNAs are separated by a cleavage site such as a nucleotide sequence encoding a microRNA recognition/cleavage site or a self-cleaving ribozyme (see, e. g., Ferré-D'Amaré and Scott (2014) Cold Spring Harbor Perspectives Biol., 2:a003574). In embodiments, the promoter is a pol II promoter operably linked to a nucleotide sequence encoding one or more guide RNAs. In embodiments, the promoter operably linked to one or more polynucleotides encoding elements of a genome-editing system is a constitutive promoter that drives DNA expression in plant cells; in embodiments, the promoter drives DNA expression in the nucleus or in an organelle such as a chloroplast or mitochondrion. Examples of constitutive promoters include a CaMV 35S promoter as disclosed in U.S. Pat. Nos. 5,858,742 and 5,322,938, a rice actin promoter as disclosed in U.S. Pat. No. 5,641,876, a maize chloroplast aldolase promoter as disclosed in U.S. Pat. No. 7,151,204, and an opaline synthase (NOS) and octapine synthase (OCS) promoter from Agrobacterium tumefaciens. In embodiments, the promoter operably linked to one or more polynucleotides encoding elements of a genome-editing system is a promoter from figwort mosaic virus (FMV), a RUBISCO promoter, or a pyruvate phosphate dikinase (PDK) promoter, which is active in the chloroplasts of mesophyll cells. Other contemplated promoters include cell-specific or tissue-specific or developmentally regulated promoters, for example, a promoter that limits the expression of the nucleic acid targeting system to germline or reproductive cells (e. g., promoters of genes encoding DNA ligases, recombinases, replicases, or other genes specifically expressed in germline or reproductive cells); in such embodiments, the nuclease-mediated genetic modification (e. g., chromosomal or episomal double-stranded DNA cleavage) is limited only those cells from which DNA is inherited in subsequent generations, which is advantageous where it is desirable that expression of the genome-editing system be limited in order to avoid genotoxicity or other unwanted effects. All of the patent publications referenced in this paragraph are incorporated herein by reference in their entirety.

[0053] In some embodiments, elements of a genome-editing system (e.g., an RNA-guided nuclease and a guide RNA) are operably linked to separate regulatory elements on separate vectors. In other embodiments, two or more elements of a genome-editing system expressed from the same or different regulatory elements or promoters are combined in a single vector, optionally with one or more additional vectors providing any additional necessary elements of a genome-editing system not included in the first vector. For example, multiple guide RNAs can be expressed from one vector, with the appropriate RNA-guided nuclease expressed from a second vector. In another example, one or more vectors for the expression of one or more guide RNAs (e. g., crRNAs or sgRNAs) are delivered to a cell (e. g., a plant cell or a plant protoplast) that expresses the appropriate RNA-guided nuclease, or to a cell that otherwise contains the nuclease, such as by way of prior administration thereto of a vector for in vivo expression of the nuclease.

[0054] Genome-editing system elements that are combined in a single vector may be arranged in any suitable orientation, such as one element located 5′ with respect to (“upstream” of) or 3′ with respect to (“downstream” of) a second element. The coding sequence of one element may be located on the same or opposite strand of the coding sequence of a second element, and oriented in the same or opposite direction. In embodiments, the endonuclease and the nucleic acid-targeting guide RNA may be operably linked to and expressed from the same promoter. In embodiments, a single promoter drives expression of a transcript encoding an endonuclease and the guide RNA, embedded within one or more intron sequences (e. g., each in a different intron, two or more in at least one intron, or all in a single intron), which can be plant-derived; such use of introns is especially contemplated when the expression vector is being transformed or transfected into a monocot plant cell or a monocot plant protoplast.

[0055] Expression vectors provided herein may contain a DNA segment near the 3′ end of an expression cassette that acts as a signal to terminate transcription and directs polyadenylation of the resultant mRNA. Such a 3′ element is commonly referred to as a “3′-untranslated region” or “3′-UTR” or a “polyadenylation signal”. Useful 3′ elements include: Agrobacterium tumefaciens nos 3′, tml 3′, tmr 3′, tms 3′, ocs 3′, and tr7 3′ elements disclosed in U.S. Pat. No. 6,090,627, incorporated herein by reference, and 3′ elements from plant genes such as the heat shock protein 17, ubiquitin, and fructose-1,6-biphosphatase genes from wheat (Triticum aestivum), and the glutelin, lactate dehydrogenase, and beta-tubulin genes from rice (Oryza sativa), disclosed in U. S. Patent Application Publication 2002/0192813 A1, incorporated herein by reference.

[0056] In certain embodiments, a vector or an expression cassette includes additional components, e. g., a polynucleotide encoding a drug resistance or herbicide gene or a polynucleotide encoding a detectable marker such as green fluorescent protein (GFP) or beta-glucuronidase (gus) to allow convenient screening or selection of cells expressing the vector. In embodiments, the vector or expression cassette includes additional elements for improving delivery to a plant cell or plant protoplast or for directing or modifying expression of one or more genome-editing system elements, for example, fusing a sequence encoding a cell-penetrating peptide, localization signal, transit, or targeting peptide to the RNA-guided nuclease, or adding a nucleotide sequence to stabilize a guide RNA; such fusion proteins (and the polypeptides encoding such fusion proteins) or combination polypeptides, as well as expression cassettes and vectors for their expression in a cell, are specifically claimed. In embodiments, an RNA-guided nuclease (e. g., Cas9, Cpf1, CasY, CasX, C2c1, or C2c3) is fused to a localization signal, transit, or targeting peptide, e. g., a nuclear localization signal (NLS), a chloroplast transit peptide (CTP), or a mitochondrial targeting peptide (MTP); in a vector or an expression cassette, the nucleotide sequence encoding any of these can be located either 5′ and/or 3′ to the DNA encoding the nuclease. For example, a plant-codon-optimized Cas9 (pco-Cas9) from Streptococcus pyogenes and S. thermophilus containing nuclear localization signals and codon-optimized for expression in maize is disclosed in PCT/US2015/018104 (published as WO/2015/131101 and claiming priority to U.S. Provisional Patent Application 61/945,700), incorporated herein by reference. In another example, a chloroplast-targeting RNA is appended to the 5′ end of an mRNA encoding an endonuclease to drive the accumulation of the mRNA in chloroplasts; see Gomez, et al. (2010) Plant Signal Behav., 5: 1517-1519. In an embodiment, a Cas9 from Streptococcus pyogenes is fused to a nuclear localization signal (NLS), such as the NLS from SV40. In an embodiment, a Cas9 from Streptococcus pyogenes is fused to a cell-penetrating peptide (CPP), such as octa-arginine or nona-arginine or a homoarginine 12-mer oligopeptide, or a CPP disclosed in the database of cell-penetrating peptides CPPsite 2.0, publicly available at crdd[dot]osdd[dot]net/raghava/cppsite/. In an example, a Cas9 from Streptococcus pyogenes (which normally carries a net positive charge) is modified at the N-terminus with a negatively charged glutamate peptide “tag” and at the C-terminus with a nuclear localization signal (NLS); when mixed with cationic arginine gold nanoparticles (ArgNPs), self-assembled nanoassemblies were formed which were shown to provide good editing efficiency in human cells; see Mout et al. (2017) ACS Nano, doi:10.1021/acsnano.6b07600. In an embodiment, a Cas9 from Streptococcus pyogenes is fused to a chloroplast transit peptide (CTP) sequence. In embodiments, a CTP sequence is obtained from any nuclear gene that encodes a protein that targets a chloroplast, and the isolated or synthesized CTP DNA is appended to the 5′ end of the DNA that encodes a nuclease targeted for use in a chloroplast. Chloroplast transit peptides and their use are described in U.S. Pat. Nos. 5,188,642, 5,728,925, and 8,420,888, all of which are incorporated herein by reference in their entirety. Specifically, the CTP nucleotide sequences provided with the sequence identifier (SEQ ID) numbers 12-15 and 17-22 of U.S. Pat. No. 8,420,888 are incorporated herein by reference. In an embodiment, a Cas9 from Streptococcus pyogenes is fused to a mitochondrial targeting peptide (MTP), such as a plant MTP sequence; see, e. g., Jores et al. (2016) Nature Communications, 7:12036-12051.

[0057] Plasmids designed for use in plants and encoding CRISPR genome editing elements (CRISPR nucleases and guide RNAs) are publicly available from plasmid repositories such as Addgene (Cambridge, Mass.; also see “addgene[dot]com”) or can be designed using publicly disclosed sequences, e. g., sequences of CRISPR nucleases. In embodiments, such plasmids are used to co-express both CRISPR nuclease mRNA and guide RNA(s); in other embodiments, CRISPR endonuclease mRNA and guide RNA are encoded on separate plasmids. In embodiments, the plasmids are Agrobacterium TI plasmids. Materials and methods for preparing expression cassettes and vectors for CRISPR endonuclease and guide RNA for stably integrated and/or transient plant transformation are disclosed in PCT/US2015/018104 (published as WO/2015/131101 and claiming priority to U.S. Provisional Patent Application 61/945,700), U. S. Patent Application Publication 2015/0082478 A1, and PCT/US2015/038767 (published as WO/2016/007347 and claiming priority to U.S. Provisional Patent Application 62/023,246), all of which are incorporated herein by reference in their entirety. In embodiments, such expression cassettes are isolated linear fragments, or are part of a larger construct that includes bacterial replication elements and selectable markers; such embodiments are useful, e. g., for particle bombardment or nanoparticle delivery or protoplast transformation. In embodiments, the expression cassette is adjacent to or located between T-DNA borders or contained within a binary vector, e. g., for Agrobacterium-mediated transformation. In embodiments, a plasmid encoding a CRISPR nuclease is delivered to cell (such as a plant cell or a plant protoplast) for stable integration of the CRISPR nuclease into the genome of cell, or alternatively for transient expression of the CRISPR nuclease. In embodiments, plasmids encoding a CRISPR nuclease are delivered to a plant cell or a plant protoplast to achieve stable or transient expression of the CRISPR nuclease, and one or multiple guide RNAs (such as a library of individual guide RNAs or multiple pooled guide RNAs) or plasmids encoding the guide RNAs are delivered to the plant cell or plant protoplast individually or in combinations, thus providing libraries or arrays of plant cells or plant protoplasts (or of plant callus or whole plants derived therefrom), in which a variety of genome edits are provided by the different guide RNAs. A pool or arrayed collection of diverse modified plant cells comprising subsets of targeted modifications (e.g., a collection of plant cells or plants where some plants are homozygous and some are heterozygous for one, two, three or more targeted modifications) can be compared to determine the function of modified sequences (e.g., mutated or deleted sequences or genes) or the function of sequences being inserted. In other words, the methods and tools described herein can be used to perform “reverse genetics.”

[0058] In certain embodiments where the genome-editing system is a CRISPR system, expression of the guide RNA is driven by a plant U6 spliceosomal RNA promoter, which can be native to the genome of the plant cell or from a different species, e. g., a U6 promoter from maize, tomato, or soybean such as those disclosed in PCT/US2015/018104 (published as WO 2015/131101 and claiming priority to U.S. Provisional Patent Application 61/945,700), incorporated herein by reference, or a homologue thereof; such a promoter is operably linked to DNA encoding the guide RNA for directing an endonuclease, followed by a suitable 3′ element such as a U6 poly-T terminator. In another embodiment, an expression cassette for expressing guide RNAs in plants is used, wherein the promoter is a plant U3, 7SL (signal recognition particle RNA), U2, or U5 promoter, or chimerics thereof, e. g., as described in PCT/US2015/018104 (published as WO 2015/131101 and claiming priority to U.S. Provisional Patent Application 61/945,700), incorporated herein by reference. When multiple or different guide RNA sequences are used, a single expression construct may be used to correspondingly direct the genome editing activity to the multiple or different target sequences in a cell, such a plant cell or a plant protoplast. In various embodiments, a single vector includes 1, 2, 3, 4, 5, 6, 7, 8, 9, 10, about 15, about 20, or more guide RNA sequences; in other embodiments, 1, 2, 3, 4, 5, 6, 7, 8, 9, 10, about 15, about 20, or more guide RNA sequences are provided on multiple vectors, which can be delivered to one or multiple plant cells or plant protoplasts (e. g., delivered to an array of plant cells or plant protoplasts, or to a pooled population of plant cells or plant protoplasts).

[0059] In embodiments, one or more guide RNAs and the corresponding RNA-guided nuclease are delivered together or simultaneously. In other embodiments, one or more guide RNAs and the corresponding RNA-guided nuclease are delivered separately; these can be delivered in separate, discrete steps and using the same or different delivery techniques. In an example, an RNA-guided nuclease is delivered to a cell (such as a plant cell or plant protoplast) by particle bombardment, on carbon nanotubes, or by Agrobacterium-mediated transformation, and one or more guide RNAs is delivered to the cell in a separate step using the same or different delivery technique. In embodiments, an RNA-guided nuclease encoded by a DNA molecule or an mRNA is delivered to a cell with enough time prior to delivery of the guide RNA to permit expression of the nuclease in the cell; for example, an RNA-guided nuclease encoded by a DNA molecule or an mRNA is delivered to a plant cell or plant protoplast between 1-12 hours (e. g., about 1, 2, 3, 4, 5, 6, 7, 8, 9, 10, 11, or 12 hours, or between about 1-6 hours or between about 2-6 hours) prior to the delivery of the guide RNA to the plant cell or plant protoplast. In embodiments, whether the RNA-guided nuclease is delivered simultaneously with or separately from an initial dose of guide RNA, succeeding “booster” doses of guide RNA are delivered subsequent to the delivery of the initial dose; for example, a second “booster” dose of guide RNA is delivered to a plant cell or plant protoplast between 1-12 hours (e. g., about 1, 2, 3, 4, 5, 6, 7, 8, 9, 10, 11, or 12 hours, or between about 1-6 hours or between about 2-6 hours) subsequent to the delivery of the initial dose of guide RNA to the plant cell or plant protoplast. Similarly, in some embodiments, multiple deliveries of an RNA-guided nuclease or of a DNA molecule or an mRNA encoding an RNA-guided nuclease are used to increase efficiency of the genome modification.

[0060] In embodiments, the desired genome modification involves non-homologous recombination, in this case non-homologous end-joining of genomic sequence across one or more introduced double-strand breaks; generally, such embodiments do not require a donor template having homology “arms” (regions of homologous or complimentary sequence to genomic sequence flanking the site of the DSB). In various embodiments described herein, donor polynucleotides encoding sequences for targeted insertion at double-stranded breaks are single-stranded polynucleotides comprising RNA or DNA or both types of nucleotides; or the donor polynucleotides are at least partially double-stranded and comprise RNA, DNA or both types of nucleotides. Other modified nucleotides may also be used.

[0061] In other embodiments, the desired genome modification involves homologous recombination, wherein one or more double-stranded DNA break in the target nucleotide sequence is generated by the RNA-guided nuclease and guide RNA(s), followed by repair of the break(s) using a homologous recombination mechanism (“homology-directed repair”). In such embodiments, a donor template that encodes the desired nucleotide sequence to be inserted or knocked-in at the double-stranded break and generally having homology “arms” (regions of homologous or complimentary sequence to genomic sequence flanking the site of the DSB) is provided to the cell (such as a plant cell or plant protoplast); examples of suitable templates include single-stranded DNA templates and double-stranded DNA templates (e. g., in the form of a plasmid). In general, a donor template encoding a nucleotide change over a region of less than about 50 nucleotides is conveniently provided in the form of single-stranded DNA; larger donor templates (e. g., more than 100 nucleotides) are often conveniently provided as double-stranded DNA plasmids.

[0062] In certain embodiments directed to the targeted incorporation of sequences by homologous recombination, a donor template has a core nucleotide sequence that differs from the target nucleotide sequence (e. g., a homologous endogenous genomic region) by at least 1, at least 5, at least 10, at least 20, at least 30, at least 40, at least 50, or more nucleotides. This core sequence is flanked by “homology arms” or regions of high sequence identity with the targeted nucleotide sequence; in embodiments, the regions of high identity include at least 10, at least 50, at least 100, at least 150, at least 200, at least 300, at least 400, at least 500, at least 600, at least 750, or at least 1000 nucleotides on each side of the core sequence. In embodiments where the donor template is in the form of a single-stranded DNA, the core sequence is flanked by homology arms including at least 10, at least 20, at least 30, at least 40, at least 50, at least 60, at least 70, at least 80, or at least 100 nucleotides on each side of the core sequence. In embodiments where the donor template is in the form of a double-stranded DNA plasmid, the core sequence is flanked by homology arms including at least 500, at least 600, at least 700, at least 800, at least 900, or at least 1000 nucleotides on each side of the core sequence. In an embodiment, two separate double-strand breaks are introduced into the cell's target nucleotide sequence with a “double nickase” Cas9 (see Ran et al. (2013) Cell, 154:1380-1389), followed by delivery of the donor template.

### Delivery Methods and Agents

[0063] Aspects of the invention involve various treatments employed to deliver to a plant cell or protoplast a guide RNA (gRNA), such as a crRNA or sgRNA (or a polynucleotide encoding such), and/or a polynucleotide encoding a sequence for targeted insertion at a double-strand break in a genome. In embodiments, one or more treatments are employed to deliver the gRNA into a plant cell or plant protoplast, e. g., through barriers such as a cell wall or a plasma membrane or nuclear envelope or other lipid bilayer.

[0064] Unless otherwise stated, the various compositions and methods described herein for delivering guide RNAs and nucleases to a plant cell or protoplast are also generally useful for delivering donor polynucleotides to the cell. The delivery of donor polynucleotides can be simultaneous with, or separate from (generally after) delivery of the nuclease and guide RNA to the cell. For example, a donor polynucleotide can be transiently introduced into a plant cell or plant protoplast, optionally with the nuclease and/or gRNA; in certain embodiments, the donor template is provided to the plant cell or plant protoplast in a quantity that is sufficient to achieve the desired insertion of the donor polynucleotide sequence but donor polynucleotides do not persist in the plant cell or plant protoplast after a given period of time (e. g., after one or more cell division cycles).

[0065] In certain embodiments, a gRNA- or donor polynucleotide, in addition to other agents involved in targeted modifications, can be delivered to a plant cell or protoplast by directly contacting the plant cell or protoplast with a composition comprising the gRNA(s) or donor polynucleotide(s). For example, a gRNA-containing composition in the form of a liquid, a solution, a suspension, an emulsion, a reverse emulsion, a colloid, a dispersion, a gel, liposomes, micelles, an injectable material, an aerosol, a solid, a powder, a particulate, a nanoparticle, or a combination thereof can be applied directly to a plant cell (or plant part or tissue containing the plant cell) or plant protoplast (e. g., through abrasion or puncture or otherwise disruption of the cell wall or cell membrane, by spraying or dipping or soaking or otherwise directly contacting, or by microinjection). In certain embodiments, a plant cell (or plant part or tissue containing the plant cell) or plant protoplast is soaked in a liquid gRNA-containing composition, whereby the gRNA is delivered to the plant cell or plant protoplast. In embodiments, the gRNA-containing composition is delivered using negative or positive pressure, for example, using vacuum infiltration or application of hydrodynamic or fluid pressure. In embodiments, the gRNA-containing composition is introduced into a plant cell or plant protoplast, e. g., by microinjection or by disruption or deformation of the cell wall or cell membrane, for example by physical treatments such as by application of negative or positive pressure, shear forces, or treatment with a chemical or physical delivery agent such as surfactants, liposomes, or nanoparticles; see, e. g., delivery of materials to cells employing microfluidic flow through a cell-deforming constriction as described in US Published Patent Application 2014/0287509, incorporated by reference in its entirety herein. Other techniques useful for delivering the gRNA-containing composition to a plant cell or plant protoplast include: ultrasound or sonication; vibration, friction, shear stress, vortexing, cavitation; centrifugation or application of mechanical force; mechanical cell wall or cell membrane deformation or breakage; enzymatic cell wall or cell membrane breakage or permeabilization; abrasion or mechanical scarification (e. g., abrasion with carborundum or other particulate abrasive or scarification with a file or sandpaper) or chemical scarification (e. g., treatment with an acid or caustic agent); and electroporation. In embodiments, the gRNA-containing composition is provided by bacterially mediated (e. g., Agrobacterium sp., Rhizobium sp., Sinorhizobium sp., Mesorhizobium sp., Bradyrhizobium sp., Azobacter sp., Phyllobacterium sp.) transfection of the plant cell or plant protoplast with a polynucleotide encoding the gRNA; see, e. g., Broothaerts et al. (2005) Nature, 433:629-633. Any of these techniques or a combination thereof are alternatively employed on the plant part or tissue or intact plant (or seed) from which a plant cell or plant protoplast is optionally subsequently obtained or isolated; in embodiments, the gRNA-containing composition is delivered in a separate step after the plant cell or plant protoplast has been obtained or isolated.

[0066] In embodiments, a treatment employed in delivery of a gRNA to a plant cell or plant protoplast is carried out under a specific thermal regime, which can involve one or more appropriate temperatures, e. g., chilling or cold stress (exposure to temperatures below that at which normal plant growth occurs), or heating or heat stress (exposure to temperatures above that at which normal plant growth occurs), or treating at a combination of different temperatures. In embodiments, a specific thermal regime is carried out on the plant cell or plant protoplast, or on a plant or plant part from which a plant cell or plant protoplast is subsequently obtained or isolated, in one or more steps separate from the gRNA delivery.

[0067] In embodiments, a whole plant or plant part or seed, or an isolated plant cell or plant protoplast, or the plant or plant part from which a plant cell or plant protoplast is obtained or isolated, is treated with one or more delivery agents which can include at least one chemical, enzymatic, or physical agent, or a combination thereof. In embodiments, a gRNA-containing composition further includes one or more one chemical, enzymatic, or physical agent for delivery. In embodiments that further include the step of providing an RNA-guided nuclease or a polynucleotide that encodes the RNA-guided nuclease, a gRNA-containing composition including the RNA-guided nuclease or polynucleotide that encodes the RNA-guided nuclease further includes one or more one chemical, enzymatic, or physical agent for delivery. Treatment with the chemical, enzymatic or physical agent can be carried out simultaneously with the gRNA delivery, with the RNA-guided nuclease delivery, or in one or more separate steps that precede or follow the gRNA delivery or the RNA-guided nuclease delivery. In embodiments, a chemical, enzymatic, or physical agent, or a combination of these, is associated or complexed with the polynucleotide composition, with the gRNA or polynucleotide that encodes or is processed to the gRNA, or with the RNA-guided nuclease or polynucleotide that encodes the RNA-guided nuclease; examples of such associations or complexes include those involving non-covalent interactions (e. g., ionic or electrostatic interactions, hydrophobic or hydrophilic interactions, formation of liposomes, micelles, or other heterogeneous composition) and covalent interactions (e. g., peptide bonds, bonds formed using cross-linking agents). In non-limiting examples, a gRNA or polynucleotide that encodes or is processed to the gRNA is provided as a liposomal complex with a cationic lipid; a gRNA or polynucleotide that encodes or is processed to the gRNA is provided as a complex with a carbon nanotube; and an RNA-guided nuclease is provided as a fusion protein between the nuclease and a cell-penetrating peptide. Examples of agents useful for delivering a gRNA or polynucleotide that encodes or is processed to the gRNA or a nuclease or polynucleotide that encodes the nuclease include the various cationic liposomes and polymer nanoparticles reviewed by Zhang et al. (2007) J. Controlled Release, 123:1-10, and the cross-linked multilamellar liposomes described in U. S. Patent Application Publication 2014/0356414 A1, incorporated by reference in its entirety herein.

[0068] In embodiments, the chemical agent is at least one selected from the group consisting of:
[0069] (a) solvents (e. g., water, dimethylsulfoxide, dimethylformamide, acetonitrile, N-pyrrolidine, pyridine, hexamethylphosphoramide, alcohols, alkanes, alkenes, dioxanes, polyethylene glycol, and other solvents miscible or emulsifiable with water or that will dissolve phosphonucleotides in non-aqueous systems);
[0070] (b) fluorocarbons (e. g., perfluorodecalin, perfluoromethyldecalin);
[0071] (c) glycols or polyols (e. g., propylene glycol, polyethylene glycol);
[0072] (d) surfactants, including cationic surfactants, anionic surfactants, non-ionic surfactants, and amphiphilic surfactants, e. g., alkyl or aryl sulfates, phosphates, sulfonates, or carboxylates; primary, secondary, or tertiary amines; quaternary ammonium salts; sultaines, betaines; cationic lipids; phospholipids; tallowamine; bile acids such as cholic acid; long chain alcohols; organosilicone surfactants including nonionic organosilicone surfactants such as trisiloxane ethoxylate surfactants or a silicone polyether copolymer such as a copolymer of polyalkylene oxide modified heptamethyl trisiloxane and allyloxypolypropylene glycol methylether (commercially available as SILWET L77™ brand surfactant having CAS Number 27306-78-1 and EPA Number CAL. REG. NO. 5905-50073-AA, Momentive Performance Materials, Inc., Albany, N.Y.); specific examples of useful surfactants include sodium lauryl sulfate, the Tween series of surfactants, Triton-X100, Triton-X114, CHAPS and CHAPSO, Tergitol-type NP-40, Nonidet P-40;
[0073] (e) lipids, lipoproteins, lipopolysaccharides;
[0074] (f) acids, bases, caustic agents;
[0075] (g) peptides, proteins, or enzymes (e. g., cellulase, pectolyase, maceroenzyme, pectinase), including cell-penetrating or pore-forming peptides (e. g., (BO100)2K8, Genscript; poly-lysine, poly-arginine, or poly-homoarginine peptides; gamma zein, see U. S. Patent Application publication 2011/0247100, incorporated herein by reference in its entirety; transcription activator of human immunodeficiency virus type 1 (“HIV-1 Tat”) and other Tat proteins, see, e. g., www[dot]lifetein[dot]com/Cell_Penetrating_Peptides[dot]html and Järver (2012) Mol. Therapy-Nucleic Acids, 1:e27, 1-17); octa-arginine or nona-arginine; poly-homoarginine (see Unnamalai et al. (2004) FEBS Letters, 566:307-310); see also the database of cell-penetrating peptides CPPsite 2.0 publicly available at crdd[dot]osdd[dot]net/raghava/cppsite/(h)
[0076] (h) RNase inhibitors;
[0077] (i) cationic branched or linear polymers such as chitosan, poly-lysine, DEAE-dextran, polyvinylpyrrolidone (“PVP”), or polyethylenimine (“PEI”, e. g., PEI, branched, MW 25,000, CAS #9002-98-6; PEI, linear, MW 5000, CAS #9002-98-6; PEI linear, MW 2500, CAS #9002-98-6);
[0078] (j) dendrimers (see, e. g., U. S. Patent Application Publication 2011/0093982, incorporated herein by reference in its entirety);
[0079] (k) counter-ions, amines or polyamines (e. g., spermine, spermidine, putrescine), osmolytes, buffers, and salts (e. g., calcium phosphate, ammonium phosphate);
[0080] (l) polynucleotides (e. g., non-specific double-stranded DNA, salmon sperm DNA);
[0081] (m) transfection agents (e. g., Lipofectin®, Lipofectamine®, and Oligofectamine®, and Invivofectamine® (all from Thermo Fisher Scientific, Waltham, Mass.), PepFect (see Ezzat et al. (2011) Nucleic Acids Res., 39:5284-5298), Transit® transfection reagents (Minis Bio, LLC, Madison, Wis.), and poly-lysine, poly-homoarginine, and poly-arginine molecules including octo-arginine and nono-arginine as described in Lu et al. (2010) J. Agric. Food Chem., 58:2288-2294);
[0082] (n) antibiotics, including non-specific DNA double-strand-break-inducing agents (e. g., phleomycin, bleomycin, talisomycin); and
[0083] (o) antioxidants (e. g., glutathione, dithiothreitol, ascorbate).

[0084] In embodiments, the chemical agent is provided simultaneously with the gRNA (or polynucleotide encoding the gRNA or that is processed to the gRNA), for example, the polynucleotide composition including the gRNA further includes one or more chemical agent. In embodiments, the gRNA or polynucleotide encoding the gRNA or that is processed to the gRNA is covalently or non-covalently linked or complexed with one or more chemical agent; for example, the gRNA or polynucleotide encoding the gRNA or that is processed to the gRNA can be covalently linked to a peptide or protein (e. g., a cell-penetrating peptide or a pore-forming peptide) or non-covalently complexed with cationic lipids, polycations (e. g., polyamines), or cationic polymers (e. g., PEI). In embodiments, the gRNA or polynucleotide encoding the gRNA or that is processed to the gRNA is complexed with one or more chemical agents to form, e. g., a solution, liposome, micelle, emulsion, reverse emulsion, suspension, colloid, or gel.

[0085] In embodiments, the physical agent is at least one selected from the group consisting of particles or nanoparticles (e. g., particles or nanoparticles made of materials such as carbon, silicon, silicon carbide, gold, tungsten, polymers, or ceramics) in various size ranges and shapes, magnetic particles or nanoparticles (e. g., silenceMag Magnetotransfection™ agent, OZ Biosciences, San Diego, Calif.), abrasive or scarifying agents, needles or microneedles, matrices, and grids. In embodiments, particulates and nanoparticulates are useful in delivery of the polynucleotide composition or the nuclease or both. Useful particulates and nanoparticles include those made of metals (e. g., gold, silver, tungsten, iron, cerium), ceramics (e. g., aluminum oxide, silicon carbide, silicon nitride, tungsten carbide), polymers (e. g., polystyrene, polydiacetylene, and poly(3,4-ethylenedioxythiophene) hydrate), semiconductors (e. g., quantum dots), silicon (e. g., silicon carbide), carbon (e. g., graphite, graphene, graphene oxide, or carbon nanosheets, nanocomplexes, or nanotubes), and composites (e. g., polyvinylcarbazole/graphene, polystyrene/graphene, platinum/graphene, palladium/graphene nanocomposites). In embodiments, such particulates and nanoparticulates are further covalently or non-covalently functionalized, or further include modifiers or cross-linked materials such as polymers (e. g., linear or branched polyethylenimine, poly-lysine), polynucleotides (e. g., DNA or RNA), polysaccharides, lipids, polyglycols (e. g., polyethylene glycol, thiolated polyethylene glycol), polypeptides or proteins, and detectable labels (e. g., a fluorophore, an antigen, an antibody, or a quantum dot). In various embodiments, such particulates and nanoparticles are neutral, or carry a positive charge, or carry a negative charge. Embodiments of compositions including particulates include those formulated, e. g., as liquids, colloids, dispersions, suspensions, aerosols, gels, and solids. Embodiments include nanoparticles affixed to a surface or support, e. g., an array of carbon nanotubes vertically aligned on a silicon or copper wafer substrate. Embodiments include polynucleotide compositions including particulates (e. g., gold or tungsten or magnetic particles) delivered by a Biolistic-type technique or with magnetic force. The size of the particles used in Biolistics is generally in the “microparticle” range, for example, gold microcarriers in the 0.6, 1.0, and 1.6 micrometer size ranges (see, e. g., instruction manual for the Helios® Gene Gun System, Bio-Rad, Hercules, Calif.; Randolph-Anderson et al. (2015) “Sub-micron gold particles are superior to larger particles for efficient Biolistic® transformation of organelles and some cell types”, Bio-Rad US/EG Bulletin 2015), but successful Biolistics delivery using larger (40 nanometer) nanoparticles has been reported in cultured animal cells; see O'Brian and Lummis (2011) BMC Biotechnol., 11:66-71. Other embodiments of useful particulates are nanoparticles, which are generally in the nanometer (nm) size range or less than 1 micrometer, e. g., with a diameter of less than about 1 nm, less than about 3 nm, less than about 5 nm, less than about 10 nm, less than about 20 nm, less than about 40 nm, less than about 60 nm, less than about 80 nm, and less than about 100 nm. Specific, non-limiting embodiments of nanoparticles commercially available (all from Sigma-Aldrich Corp., St. Louis, Mo.) include gold nanoparticles with diameters of 5, 10, or 15 nm; silver nanoparticles with particle sizes of 10, 20, 40, 60, or 100 nm; palladium “nanopowder” of less than 25 nm particle size; single-, double-, and multi-walled carbon nanotubes, e. g., with diameters of 0.7-1.1, 1.3-2.3, 0.7-0.9, or 0.7-1.3 nm, or with nanotube bundle dimensions of 2-10 nm by 1-5 micrometers, 6-9 nm by 5 micrometers, 7-15 nm by 0.5-10 micrometers, 7-12 nm by 0.5-10 micrometers, 110-170 nm by 5-9 micrometers, 6-13 nm by 2.5-20 micrometers. Embodiments include polynucleotide compositions including materials such as gold, silicon, cerium, or carbon, e. g., gold or gold-coated nanoparticles, silicon carbide whiskers, carborundum, porous silica nanoparticles, gelatin/silica nanoparticles, nanoceria or cerium oxide nanoparticles (CNPs), carbon nanotubes (CNTs) such as single-, double-, or multi-walled carbon nanotubes and their chemically functionalized versions (e. g., carbon nanotubes functionalized with amide, amino, carboxylic acid, sulfonic acid, or polyethylene glycol moeities), and graphene or graphene oxide or graphene complexes; see, for example, Wong et al. (2016) Nano Lett., 16:1161-1172; Giraldo et al. (2014) Nature Materials, 13:400-409; Shen et al. (2012) Theranostics, 2:283-294; Kim et al. (2011) Bioconjugate Chem., 22:2558-2567; Wang et al. (2010) 1 Am. Chem. Soc. Comm., 132:9274-9276; Zhao et al. (2016) Nanoscale Res. Lett., 11:195-203; and Choi et al. (2016) J. Controlled Release, 235:222-235. See also, for example, the various types of particles and nanoparticles, their preparation, and methods for their use, e. g., in delivering polynucleotides and polypeptides to cells, disclosed in U. S. Patent Application Publications 2010/0311168, 2012/0023619, 2012/0244569, 2013/0145488, 2013/0185823, 2014/0096284, 2015/0040268, 2015/0047074, and 2015/0208663, all of which are incorporated herein by reference in their entirety.

[0086] In embodiments wherein the gRNA (or polynucleotide encoding the gRNA) is provided in a composition that further includes an RNA-guided nuclease (or a polynucleotide that encodes the RNA-guided nuclease), or wherein the method further includes the step of providing an RNA-guided nuclease or a polynucleotide that encodes the RNA-guided nuclease, one or more one chemical, enzymatic, or physical agent can similarly be employed. In embodiments, the RNA-guided nuclease (or polynucleotide encoding the RNA-guided nuclease) is provided separately, e. g., in a separate composition including the RNA-guided nuclease or polynucleotide encoding the RNA-guided nuclease. Such compositions can include other chemical or physical agents (e. g., solvents, surfactants, proteins or enzymes, transfection agents, particulates or nanoparticulates), such as those described above as useful in the polynucleotide composition used to provide the gRNA. For example, porous silica nanoparticles are useful for delivering a DNA recombinase into maize cells; see, e. g., Martin-Ortigosa et al. (2015) Plant Physiol., 164:537-547. In an embodiment, the polynucleotide composition includes a gRNA and Cas9 nuclease, and further includes a surfactant and a cell-penetrating peptide. In an embodiment, the polynucleotide composition includes a plasmid that encodes both an RNA-guided nuclease and at least on gRNA, and further includes a surfactant and carbon nanotubes. In an embodiment, the polynucleotide composition includes multiple gRNAs and an mRNA encoding the RNA-guided nuclease, and further includes gold particles, and the polynucleotide composition is delivered to a plant cell or plant protoplast by Biolistics.

[0087] In related embodiments, one or more one chemical, enzymatic, or physical agent can be used in one or more steps separate from (preceding or following) that in which the gRNA is provided. In an embodiment, the plant or plant part from which a plant cell or plant protoplast is obtained or isolated is treated with one or more one chemical, enzymatic, or physical agent in the process of obtaining or isolating the plant cell or plant protoplast. In embodiments, the plant or plant part is treated with an abrasive, a caustic agent, a surfactant such as Silwet L-77 or a cationic lipid, or an enzyme such as cellulase.

[0088] In embodiments, a gRNA is delivered to plant cells or plant protoplasts prepared or obtained from a plant, plant part, or plant tissue that has been treated with the polynucleotide compositions (and optionally the nuclease). In embodiments, one or more one chemical, enzymatic, or physical agent, separately or in combination with the polynucleotide composition, is provided/applied at a location in the plant or plant part other than the plant location, part, or tissue from which the plant cell or plant protoplast is obtained or isolated. In embodiments, the polynucleotide composition is applied to adjacent or distal cells or tissues and is transported (e. g., through the vascular system or by cell-to-cell movement) to the meristem from which plant cells or plant protoplasts are subsequently isolated. In embodiments, a gRNA-containing composition is applied by soaking a seed or seed fragment or zygotic or somatic embryo in the gRNA-containing composition, whereby the gRNA is delivered to the seed or seed fragment or zygotic or somatic embryo from which plant cells or plant protoplasts are subsequently isolated. In embodiments, a flower bud or shoot tip is contacted with a gRNA-containing composition, whereby the gRNA is delivered to cells in the flower bud or shoot tip from which plant cells or plant protoplasts are subsequently isolated. In embodiments, a gRNA-containing composition is applied to the surface of a plant or of a part of a plant (e. g., a leaf surface), whereby the gRNA is delivered to tissues of the plant from which plant cells or plant protoplasts are subsequently isolated. In embodiments a whole plant or plant tissue is subjected to particle- or nanoparticle-mediated delivery (e. g., Biolistics or carbon nanotube or nanoparticle delivery) of a gRNA-containing composition, whereby the gRNA is delivered to cells or tissues from which plant cells or plant protoplasts are subsequently isolated.

### Methods of Modulating Expression of a Sequence of Interest in a Genome

[0089] In one aspect, the invention provides a method of changing expression of a sequence of interest in a genome, including integrating a sequence encoded by a polynucleotide (such as a double-stranded DNA, a single-stranded DNA, a single-stranded DNA/RNA hybrid, or a double-stranded DNA/RNA hybrid) donor molecule at the site of at least one double-strand break (DSB) in a genome. The method permits site-specific integration of heterologous sequence at the site of at least one DSB, and thus at one or more locations in a genome, such as a genome of a plant cell. In embodiments, the genome is that of a nucleus, mitochondrion, or plastid in a plant cell.

[0090] By “integration of heterologous sequence” is meant integration or insertion of one or more nucleotides, resulting in a sequence (including the inserted nucleotide(s) as well as at least some adjacent nucleotides of the genomic sequence flanking the site of insertion at the DSB) that is heterologous, i. e., would not otherwise or does not normally occur at the site of insertion. (The term “heterologous” is also used to refer to a given sequence in relationship to another—e. g., the sequence of the polynucleotide donor molecule is heterologous to the sequence at the site of the DSB wherein the polynucleotide is integrated.)

[0091] The at least one DSB is introduced into the genome by any suitable technique; in embodiments one or more DSBs is introduced into the genome in a site- or sequence-specific manner, for example, by use of at least one of the group of DSB-inducing agents consisting of: (a) a nuclease capable of effecting site-specific alteration of a target nucleotide sequence, selected from the group consisting of an RNA-guided nuclease, an RNA-guided DNA endonuclease, a type II Cas nuclease, a Cas9, a type V Cas nuclease, a Cpf1, a CasY, a CasX, a C2c1, a C2c3, an engineered nuclease, a codon-optimized nuclease, a zinc-finger nuclease (ZFN), a transcription activator-like effector nuclease (TAL-effector nuclease), an Argonaute, and a meganuclease or engineered meganuclease; (b) a polynucleotide encoding one or more nucleases capable of effecting site-specific alteration (such as introduction of a DSB) of a target nucleotide sequence; and (c) a guide RNA (gRNA) for an RNA-guided nuclease, or a DNA encoding a gRNA for an RNA-guided nuclease. In embodiments, one or more DSBs is introduced into the genome by use of both a guide RNA (gRNA) and the corresponding RNA-guided nuclease. In an example, one or more DSBs is introduced into the genome by use of a ribonucleoprotein (RNP) that includes both a gRNA (e. g., a single-guide RNA or sgRNA that includes both a crRNA and a tracrRNA) and a Cas9. It is generally desirable that the sequence encoded by the polynucleotide donor molecule is integrated at the site of the DSB at high efficiency. One measure of efficiency is the percentage or fraction of the population of cells that have been treated with a DSB-inducing agent and polynucleotide donor molecule, and in which a sequence encoded by the polynucleotide donor molecule is successfully introduced at the DSB correctly located in the genome. The efficiency of genome editing including integration of a sequence encoded by a polynucleotide donor molecule at a DSB in the genome is assessed by any suitable method such as a heteroduplex cleavage assay or by sequencing, as described elsewhere in this disclosure. In various embodiments, the DSB is induced in the correct location in the genome at a comparatively high efficiency, e. g., at about 10, about 15, about 20, about 30, about 40, about 50, about 60, about 70, or about 80 percent efficiency, or at greater than 80, 85, 90, or 95 percent efficiency (measured as the percentage of the total population of cells in which the DSB is induced at the correct location in the genome). In various embodiments, a sequence encoded by the polynucleotide donor molecule is integrated at the site of the DSB at a comparatively high efficiency, e. g., at about 10, about 15, about 20, about 30, about 40, about 50, about 60, about 70, or about 80 percent efficiency, or at greater than 80, 85, 90, or 95 percent efficiency (measured as the percentage of the total population of cells in which the polynucleotide molecule is integrated at the site of the DSB in the correct location in the genome).

[0092] Apart from the CRISPR-type nucleases, other nucleases capable of effecting site-specific alteration of a target nucleotide sequence include zinc-finger nucleases (ZFNs), transcription activator-like effector nucleases (TAL-effector nucleases or TALENs), Argonaute proteins, and a meganuclease or engineered meganuclease. Zinc finger nucleases (ZFNs) are engineered proteins comprising a zinc finger DNA-binding domain fused to a nucleic acid cleavage domain, e. g., a nuclease. The zinc finger binding domains provide specificity and can be engineered to specifically recognize any desired target DNA sequence. For a review of the construction and use of ZFNs in plants and other organisms, see, e. g., Urnov et al. (2010) Nature Rev. Genet., 11:636-646. The zinc finger DNA binding domains are derived from the DNA-binding domain of a large class of eukaryotic transcription factors called zinc finger proteins (ZFPs). The DNA-binding domain of ZFPs typically contains a tandem array of at least three zinc “fingers” each recognizing a specific triplet of DNA. A number of strategies can be used to design the binding specificity of the zinc finger binding domain. One approach, termed “modular assembly”, relies on the functional autonomy of individual zinc fingers with DNA. In this approach, a given sequence is targeted by identifying zinc fingers for each component triplet in the sequence and linking them into a multifinger peptide. Several alternative strategies for designing zinc finger DNA binding domains have also been developed. These methods are designed to accommodate the ability of zinc fingers to contact neighboring fingers as well as nucleotides bases outside their target triplet. Typically, the engineered zinc finger DNA binding domain has a novel binding specificity, compared to a naturally-occurring zinc finger protein. Modification methods include, for example, rational design and various types of selection. Rational design includes, for example, the use of databases of triplet (or quadruplet) nucleotide sequences and individual zinc finger amino acid sequences, in which each triplet or quadruplet nucleotide sequence is associated with one or more amino acid sequences of zinc fingers which bind the particular triplet or quadruplet sequence. See, e. g., U.S. Pat. Nos. 6,453,242 and 6,534,261, both incorporated herein by reference in their entirety. Exemplary selection methods (e. g., phage display and yeast two-hybrid systems) are well known and described in the literature. In addition, enhancement of binding specificity for zinc finger binding domains has been described in U.S. Pat. No. 6,794,136, incorporated herein by reference in its entirety. In addition, individual zinc finger domains may be linked together using any suitable linker sequences. Examples of linker sequences are publicly known, e. g., see U.S. Pat. Nos. 6,479,626; 6,903,185; and 7,153,949, incorporated herein by reference in their entirety. The nucleic acid cleavage domain is non-specific and is typically a restriction endonuclease, such as Fok1. This endonuclease must dimerize to cleave DNA. Thus, cleavage by Fok1 as part of a ZFN requires two adjacent and independent binding events, which must occur in both the correct orientation and with appropriate spacing to permit dimer formation. The requirement for two DNA binding events enables more specific targeting of long and potentially unique recognition sites. Fok1 variants with enhanced activities have been described; see, e. g., Guo et al. (2010) J. Mol. Biol., 400:96-107.

[0093] Transcription activator like effectors (TALEs) are proteins secreted by certain Xanthomonas species to modulate gene expression in host plants and to facilitate the colonization by and survival of the bacterium. TALEs act as transcription factors and modulate expression of resistance genes in the plants. Recent studies of TALEs have revealed the code linking the repetitive region of TALEs with their target DNA-binding sites. TALEs comprise a highly conserved and repetitive region consisting of tandem repeats of mostly 33 or 34 amino acid segments. The repeat monomers differ from each other mainly at amino acid positions 12 and 13. A strong correlation between unique pairs of amino acids at positions 12 and 13 and the corresponding nucleotide in the TALE-binding site has been found. The simple relationship between amino acid sequence and DNA recognition of the TALE binding domain allows for the design of DNA binding domains of any desired specificity. TALEs can be linked to a non-specific DNA cleavage domain to prepare genome editing proteins, referred to as TAL-effector nucleases or TALENs. As in the case of ZFNs, a restriction endonuclease, such as Fok1, can be conveniently used. For a description of the use of TALENs in plants, see Mahfouz et al. (2011) Proc. Natl. Acad. Sci. USA, 108:2623-2628 and Mahfouz (2011) GM Crops, 2:99-103.

[0094] Argonauts are proteins that can function as sequence-specific endonucleases by binding a polynucleotide (e. g., a single-stranded DNA or single-stranded RNA) that includes sequence complementary to a target nucleotide sequence) that guides the Argonaut to the target nucleotide sequence and effects site-specific alteration of the target nucleotide sequence; see, e. g., U. S. Patent Application Publication 2015/0089681, incorporated herein by reference in its entirety.

[0095] Another method of effecting targeted changes to a genome is the use of triple-forming peptide nucleic acids (PNAs) designed to bind site-specifically to genomic DNA via strand invasion and the formation of PNA/DNA/PNA triplexes (via both Watson-Crick and Hoogsteen binding) with a displaced DNA strand. PNAs consist of a charge neutral peptide-like backbone and nucleobases. The nucleobases hybridize to DNA with high affinity. The triplexes then recruit the cell's endogenous DNA repair systems to initiate site-specific modification of the genome. The desired sequence modification is provided by single-stranded ‘donor DNAs’ which are co-delivered as templates for repair. See, e. g., Bahal R et al (2016) Nature Communications, Oct. 26, 2016.

[0096] In related embodiments, zinc finger nucleases, TALENs, and Argonautes are used in conjunction with other functional domains. For example, the nuclease activity of these nucleic acid targeting systems can be altered so that the enzyme binds to but does not cleave the DNA. Examples of functional domains include transposase domains, integrase domains, recombinase domains, resolvase domains, invertase domains, protease domains, DNA methyltransferase domains, DNA hydroxylmethylase domains, DNA demethylase domains, histone acetylase domains, histone deacetylase domains, nuclease domains, repressor domains, activator domains, nuclear-localization signal domains, transcription-regulatory protein (or transcription complex recruiting) domains, cellular uptake activity associated domains, nucleic acid binding domains, antibody presentation domains, histone modifying enzymes, recruiter of histone modifying enzymes; inhibitor of histone modifying enzymes, histone methyltransferases, histone demethylases, histone kinases, histone phosphatases, histone ribosylases, histone deribosylases, histone ubiquitinases, histone deubiquitinases, histone biotinases and histone tail proteases. Non-limiting examples of functional domains include a transcriptional activation domain, a transcription repression domain, and an SHH1, SUVH2, or SUVH9 polypeptide capable of reducing expression of a target nucleotide sequence via epigenetic modification; see, e. g., U. S. Patent Application Publication 2016/0017348, incorporated herein by reference in its entirety. Genomic DNA may also be modified via base editing using a fusion between a catalytically inactive Cas9 (dCas9) is fused to a cytidine deaminase which convert cytosine (C) to uridine (U), thereby effecting a C to T substitution; see Komor et al. (2016) Nature, 533:420-424.

[0097] In embodiments, the guide RNA (gRNA) has a sequence of between 16-24 nucleotides in length (e. g., 16, 17, 18, 19, 20, 21, 22, 23, or 24 nucleotides in length). Specific embodiments include gRNAs of 19, 20, or 21 nucleotides in length and having 100% complementarity to the target nucleotide sequence. In many embodiments the gRNA has exact complementarity (i.e., perfect base-pairing) to the target nucleotide sequence; in certain other embodiments the gRNA has less than 100% complementarity to the target nucleotide sequence. The design of effective gRNAs for use in plant genome editing is disclosed in U. S. Patent Application Publication 2015/0082478 A1, the entire specification of which is incorporated herein by reference. In embodiments where multiple gRNAs are employed, the multiple gRNAs can be delivered separately (as separate RNA molecules or encoded by separate DNA molecules) or in combination, e. g., as an RNA molecule containing multiple gRNA sequences, or as a DNA molecule encoding an RNA molecule containing multiple gRNA sequences; see, for example, U. S. Patent Application Publication 2016/0264981 A1, the entire specification of which is incorporated herein by reference, which discloses RNA molecules including multiple RNA sequences (such as gRNA sequences) separated by tRNA cleavage sequences. In other embodiments, a DNA molecule encodes multiple gRNAs which are separated by other types of cleavable transcript, for example, small RNA (e. g., miRNA, siRNA, or ta-siRNA) recognition sites which can be cleaved by the corresponding small RNA, or dsRNA-forming regions which can be cleaved by a Dicer-type ribonuclease, or sequences which are recognized by RNA nucleases such as Cys4 ribonuclease from Pseudomonas aeruginosa; see, e. g., U.S. Pat. No. 7,816,581, the entire specification of which is incorporated herein by reference, which discloses in FIG. 27 and elsewhere in the specification pol II promoter-driven DNA constructs encoding RNA transcripts that are released by cleavage. Efficient Cas9-mediated gene editing has been achieved using a chimeric “single guide RNA” (“sgRNA”), an engineered (synthetic) single RNA molecule that mimics a naturally occurring crRNA-tracrRNA complex and contains both a tracrRNA (for binding the nuclease) and at least one crRNA (to guide the nuclease to the sequence targeted for editing). In other embodiments, self-cleaving ribozyme sequences can be used to separate multiple gRNA sequences within a transcript.

[0098] Thus, in certain embodiments wherein the nuclease is a Cas9-type nuclease, the gRNA can be provided as a polynucleotide composition including: (a) a CRISPR RNA (crRNA) that includes the gRNA together with a separate tracrRNA, or (b) at least one polynucleotide that encodes a crRNA and a tracrRNA (on a single polynucleotide or on separate polynucleotides), or (c) at least one polynucleotide that is processed into one or more crRNAs and a tracrRNA. In other embodiments wherein the nuclease is a Cas9-type nuclease, the gRNA can be provided as a polynucleotide composition including a CRISPR RNA (crRNA) that includes the gRNA, and the required tracrRNA is provided in a separate composition or in a separate step, or is otherwise provided to the cell (for example, to a plant cell or plant protoplast that stably or transiently expresses the tracrRNA from a polynucleotide encoding the tracrRNA). In other embodiments wherein the nuclease is a Cas9-type nuclease, the gRNA can be provided as a polynucleotide composition comprising: (a) a single guide RNA (sgRNA) that includes the gRNA, or (b) a polynucleotide that encodes a sgRNA, or (c) a polynucleotide that is processed into a sgRNA. Cpf1-mediated gene editing does not require a tracrRNA; thus, in embodiments wherein the nuclease is a Cpf1-type nuclease, the gRNA is provided as a polynucleotide composition comprising (a) a CRISPR RNA (crRNA) that includes the gRNA, or (b) a polynucleotide that encodes a crRNA, or (c) a polynucleotide that is processed into a crRNA. In embodiments, the gRNA-containing composition optionally includes an RNA-guided nuclease, or a polynucleotide that encodes the RNA-guided nuclease. In other embodiments, an RNA-guided nuclease or a polynucleotide that encodes the RNA-guided nuclease is provided in a separate step. In some embodiments of the method, a gRNA is provided to a cell (e. g., a plant cell or plant protoplast) that includes an RNA-guided nuclease or a polynucleotide that encodes an RNA-guided nuclease, e. g., an RNA-guided nuclease selected from the group consisting of an RNA-guided DNA endonuclease, a type II Cas nuclease, a Cas9, a type V Cas nuclease, a Cpf1, a CasY, a CasX, a C2c1, a C2c3, an engineered RNA-guided nuclease, and a codon-optimized RNA-guided nuclease; in an example, the cell (e. g., a plant cell or plant protoplast) stably or transiently expresses the RNA-guided nuclease. In embodiments, the polynucleotide that encodes the RNA-guided nuclease is, for example, DNA that encodes the RNA-guided nuclease and is stably integrated in the genome of a plant cell or plant protoplast, DNA or RNA that encodes the RNA-guided nuclease and is transiently present in or introduced into a plant cell or plant protoplast; such DNA or RNA can be introduced, e. g., by using a vector such as a plasmid or viral vector or as an mRNA, or as vector-less DNA or RNA introduced directly into a plant cell or plant protoplast.

[0099] In embodiments that further include the step of providing to a cell (e. g., a plant cell or plant protoplast) an RNA-guided nuclease or a polynucleotide that encodes the RNA-guided nuclease, the RNA-guided nuclease is provided simultaneously with the gRNA-containing composition, or in a separate step that precedes or follows the step of providing the gRNA-containing composition. In embodiments, the gRNA-containing composition further includes an RNA-guided nuclease or a polynucleotide that encodes the RNA-guided nuclease. In other embodiments, there is provided a separate composition that includes an RNA-guided nuclease or a polynucleotide that encodes the RNA-guided nuclease. In embodiments, the RNA-guided nuclease is provided as a ribonucleoprotein (RNP) complex, e. g., a preassembled RNP that includes the RNA-guided nuclease complexed with a polynucleotide including the gRNA or encoding a gRNA, or a preassembled RNP that includes a polynucleotide that encodes the RNA-guided nuclease (and optionally encodes the gRNA, or is provided with a separate polynucleotide including the gRNA or encoding a gRNA), complexed with a protein. In embodiments, the RNA-guided nuclease is a fusion protein, i. e., wherein the RNA-guided nuclease (e. g., Cas9, Cpf1, CasY, CasX, C2c1, or C2c3) is covalently bound through a peptide bond to a cell-penetrating peptide, a nuclear localization signal peptide, a chloroplast transit peptide, or a mitochondrial targeting peptide; such fusion proteins are conveniently encoded in a single nucleotide sequence, optionally including codons for linking amino acids. In embodiments, the RNA-guided nuclease or a polynucleotide that encodes the RNA-guided nuclease is provided as a complex with a cell-penetrating peptide or other transfecting agent. In embodiments, the RNA-guided nuclease or a polynucleotide that encodes the RNA-guided nuclease is complexed with, or covalently or non-covalently bound to, a further element, e. g., a carrier molecule, an antibody, an antigen, a viral movement protein, a polymer, a detectable label (e. g., a moiety detectable by fluorescence, radioactivity, or enzymatic or immunochemical reaction), a quantum dot, or a particulate or nanoparticulate. In embodiments, the RNA-guided nuclease or a polynucleotide that encodes the RNA-guided nuclease is provided in a solution, or is provided in a liposome, micelle, emulsion, reverse emulsion, suspension, or other mixed-phase composition.

[0100] An RNA-guided nuclease can be provided to a cell (e. g., a plant cell or plant protoplast) by any suitable technique. In embodiments, the RNA-guided nuclease is provided by directly contacting a plant cell or plant protoplast with the RNA-guided nuclease or the polynucleotide that encodes the RNA-guided nuclease. In embodiments, the RNA-guided nuclease is provided by transporting the RNA-guided nuclease or a polynucleotide that encodes the RNA-guided nuclease into a plant cell or plant protoplast using a chemical, enzymatic, or physical agent as provided in detail in the paragraphs following the heading “Delivery Methods and Delivery Agents”. In embodiments, the RNA-guided nuclease is provided by bacterially mediated (e. g., Agrobacterium sp., Rhizobium sp., Sinorhizobium sp., Mesorhizobium sp., Bradyrhizobium sp., Azobacter sp., Phyllobacterium sp.) transfection of a plant cell or plant protoplast with a polynucleotide encoding the RNA-guided nuclease; see, e. g., Broothaerts et al. (2005) Nature, 433:629-633. In an embodiment, the RNA-guided nuclease is provided by transcription in a plant cell or plant protoplast of a DNA that encodes the RNA-guided nuclease and is stably integrated in the genome of the plant cell or plant protoplast or that is provided to the plant cell or plant protoplast in the form of a plasmid or expression vector (e. g., a viral vector) that encodes the RNA-guided nuclease (and optionally encodes one or more gRNAs, crRNAs, or sgRNAs, or is optionally provided with a separate plasmid or vector that encodes one or more gRNAs, crRNAs, or sgRNAs). In embodiments, the RNA-guided nuclease is provided to the plant cell or plant protoplast as a polynucleotide that encodes the RNA-guided nuclease, e. g., in the form of an mRNA encoding the nuclease.

[0101] Where a polynucleotide is concerned (e. g., a crRNA that includes the gRNA together with a separate tracrRNA, or a crRNA and a tracrRNA encoded on a single polynucleotide or on separate polynucleotides, or at least one polynucleotide that is processed into one or more crRNAs and a tracrRNA, or a sgRNA that includes the gRNA, or a polynucleotide that encodes a sgRNA, or a polynucleotide that is processed into a sgRNA, or a polynucleotide that encodes the RNA-guided nuclease), embodiments of the polynucleotide include: (a) double-stranded RNA; (b) single-stranded RNA; (c) chemically modified RNA; (d) double-stranded DNA; (e) single-stranded DNA; (f) chemically modified DNA; or (g) a combination of (a)-(f). Where expression of a polynucleotide is involved (e. g., expression of a crRNA from a DNA encoding the crRNA, or expression and translation of a RNA-guided nuclease from a DNA encoding the nuclease), in some embodiments it is sufficient that expression be transient, i. e., not necessarily permanent or stable in the cell. Certain embodiments of the polynucleotide further include additional nucleotide sequences that provide useful functionality; non-limiting examples of such additional nucleotide sequences include an aptamer or riboswitch sequence, nucleotide sequence that provides secondary structure such as stem-loops or that provides a sequence-specific site for an enzyme (e. g., a sequence-specific recombinase or endonuclease site), T-DNA (e. g., DNA sequence encoding a gRNA, crRNA, tracrRNA, or sgRNA is enclosed between left and right T-DNA borders from Agrobacterium spp. or from other bacteria that infect or induce tumours in plants), a DNA nuclear-targeting sequence, a regulatory sequence such as a promoter sequence, and a transcript-stabilizing sequence. Certain embodiments of the polynucleotide include those wherein the polynucleotide is complexed with, or covalently or non-covalently bound to, a non-nucleic acid element, e. g., a carrier molecule, an antibody, an antigen, a viral movement protein, a cell-penetrating or pore-forming peptide, a polymer, a detectable label, a quantum dot, or a particulate or nanoparticulate.

[0102] In embodiments, the at least one DSB is introduced into the genome by at least one treatment selected from the group consisting of: (a) bacterially mediated (e. g., Agrobacterium sp., Rhizobium sp., Sinorhizobium sp., Mesorhizobium sp., Bradyrhizobium sp., Azobacter sp., Phyllobacterium sp.) transfection with a DSB-inducing agent; (b) Biolistics or particle bombardment with a DSB-inducing agent; (c) treatment with at least one chemical, enzymatic, or physical agent as provided in detail in the paragraphs following the heading “Delivery Methods and Delivery Agents”; and (d) application of heat or cold, ultrasonication, centrifugation, positive or negative pressure, cell wall or membrane disruption or deformation, or electroporation. It is generally desirable that introduction of the at least one DSB into the genome (i. e., the “editing” of the genome) is achieved with sufficient efficiency and accuracy to ensure practical utility. One measure of efficiency is the percentage or fraction of the population of cells that have been treated with a DSB-inducing agent and in which the DSB is successfully introduced at the correct site in the genome. The efficiency of genome editing is assessed by any suitable method such as a heteroduplex cleavage assay or by sequencing, as described elsewhere in this disclosure. Accuracy is indicated by the absence of, or minimal occurrence of, off-target introduction of a DSB (i. e., at other than the intended site in the genome).

[0103] The location where the at least one DSB is inserted varies according to the desired result, for example whether the intention is to simply disrupt expression of the sequence of interest, or to add functionality (such as placing expression of the sequence of interest under inducible control). Thus, the location of the DSB is not necessarily within or directly adjacent to the sequence of interest. In embodiments, the at least one DSB in a genome is located: (a) within the sequence of interest, (b) upstream of (i. e., 5′ to) the sequence of interest, or (c) downstream of (i. e., 3′ to) the sequence of interest. In embodiments, a sequence encoded by the polynucleotide (such as a double-stranded DNA, a single-stranded DNA, a single-stranded DNA/RNA hybrid, or a double-stranded DNA/RNA hybrid) donor molecule, when integrated into the genome, is functionally or operably linked (e. g., linked in a manner that modifies the transcription or the translation of the sequence of interest or that modifies the stability of a transcript including that of the sequence of interest) to the sequence of interest. In embodiments, a sequence encoded by the polynucleotide donor molecule is integrated at a location 5′ to and operably linked to the sequence of interest, wherein the integration location is selected to provide a specifically modulated (upregulated or downregulated) level of expression of the sequence of interest. For example, a sequence encoded by the polynucleotide donor molecule is integrated at a specific location in the promoter region of a protein-encoding gene that results in a desired expression level of the protein; in an embodiment, the appropriate location is determined empirically by integrating a sequence encoded by the polynucleotide donor molecule at about 50, about 100, about 150, about 200, about 250, about 300, about 350, about 400, about 450, and about 500 nucleotides 5′ to (upstream of) the start codon of the coding sequence, and observing the relative expression levels of the protein for each integration location.

[0104] In embodiments, the donor polynucleotide sequence of interest includes coding (protein-coding) sequence, non-coding (non-protein-coding) sequence, or a combination of coding and non-coding sequence. Embodiments include a plant nuclear sequence, a plant plastid sequence, a plant mitochondrial sequence, a sequence of a symbiont, pest, or pathogen of a plant, and combinations thereof. Embodiments include exons, introns, regulatory sequences including promoters, other 5′ elements and 3′ elements, and genomic loci encoding non-coding RNAs including long non-coding RNAs (lncRNAs), microRNAs (miRNAs), and trans-acting siRNAs (ta-siRNAs). In embodiments, multiple sequences are altered, for example, by delivery of multiple gRNAs to the plant cell or plant protoplast; the multiple sequences can be part of the same gene (e. g., different locations in a single coding region or in different exons or introns of a protein-coding gene) or different genes. In embodiments, the sequence of an endogenous genomic locus is altered to delete, add, or modify a functional non-coding sequence; in non-limiting examples, such functional non-coding sequences include, e. g., a miRNA, siRNA, or to-siRNA recognition or cleavage site, a splice site, a recombinase recognition site, a transcription factor binding site, or a transcriptional or translational enhancer or repressor sequence.

[0105] In embodiments, the invention provides a method of changing expression of a sequence of interest in a genome, including integrating a sequence encoded by a polynucleotide (such as a double-stranded DNA, a single-stranded DNA, a single-stranded DNA/RNA hybrid, or a double-stranded DNA/RNA hybrid) donor molecule at the site of two or more DSBs in a genome. In embodiments, the sequence of the polynucleotide donor molecule that is integrated into each of the two or more DSBs is (a) identical, or (b) different, for each of the DSBs. In embodiments, the change in expression of a sequence of interest in genome is manifested as the expression of an altered or edited sequence of interest; in non-limiting examples, the method is used to integrate sequence-specific recombinase recognition site sequences at two DSBs in a genome, whereby, in the presence of the corresponding site-specific DNA recombinase, the genomic sequence flanked on either side by the integrated recombinase recognition sites is excised from the genome (or in some instances is inverted); such an approach is useful, e. g., for deletion of larger lengths of genomic sequence, for example, deletion of all or part of an exon or of one or more protein domains. In other embodiments, at least two DSBs are introduced into a genome by one or more nucleases in such a way that genomic sequence is deleted between the DSBs (leaving a deletion with blunt ends, overhangs or a combination of a blunt end and an overhang), and a sequence encoded by at least one polynucleotide donor molecule is integrated between the DSBs (i. e., a sequence encoded by at least one individual polynucleotide donor molecule is integrated at the location of the deleted genomic sequence), wherein the genomic sequence that is deleted is coding sequence, non-coding sequence, or a combination of coding and non-coding sequence; such embodiments provide the advantage of not requiring a specific PAM site at or very near the location of a region wherein a nucleotide sequence change is desired. In an embodiment, at least two DSBs are introduced into a genome by one or more nucleases in such a way that genomic sequence is deleted between the DSBs (leaving a deletion with blunt ends, overhangs or a combination of a blunt end and an overhang), and at least one sequence encoded by a polynucleotide donor molecule is integrated between the DSBs (i. e., at least one individual sequence encoded by a polynucleotide donor molecule is integrated at the location of the deleted genomic sequence). In an embodiment, two DSBs are introduced into a genome, resulting in excision or deletion of genomic sequence between the sites of the two DSBs, and a sequence encoded by a polynucleotide donor molecule integrated into the genome at the location of the deleted genomic sequence (that is, a sequence encoded by an individual polynucleotide donor molecule is integrated between the two DSBs). Generally, the polynucleotide donor molecule with the sequence to be integrated into the genome is selected in terms of the presence or absence of terminal overhangs to match the type of DSBs introduced. In an embodiment, two blunt-ended DSBs are introduced into a genome, resulting in excision or deletion of genomic sequence between the sites of the two blunt-ended DSBs, and a sequence encoded by a blunt-ended double-stranded DNA or blunt-ended double-stranded DNA/RNA hybrid or a single-stranded DNA or a single-stranded DNA/RNA hybrid donor molecule is integrated into the genome between the two blunt-ended DSBs. In another embodiment, two DSBs are introduced into a genome, wherein the first DSB is blunt-ended and the second DSB has an overhang, resulting in deletion of genomic sequence between the two DSBs, and a sequence encoded by a double-stranded DNA or double-stranded DNA/RNA hybrid donor molecule that is blunt-ended at one terminus and that has an overhang on the other terminus (or, alternatively, a single-stranded DNA or a single-stranded DNA/RNA hybrid molecule) is integrated into the genome between the two DSBs; in an alternative embodiment, two DSBs are introduced into a genome, wherein both DSBs have overhangs but of different overhang lengths (different number of unpaired nucleotides), resulting in deletion of genomic sequence between the two DSBs, and a sequence encoded by a double-stranded DNA or double-stranded DNA/RNA hybrid donor molecule that has overhangs at each terminus, wherein the overhangs are of unequal lengths (or, alternatively, a single-stranded DNA or a single-stranded DNA/RNA hybrid donor molecule), is integrated into the genome between the two DSBs; embodiments with such DSB asymmetry (i. e., a combination of DSBs having a blunt end and an overhang, or a combination of DSBs having overhangs of unequal lengths) provide the opportunity for controlling directionality or orientation of the inserted polynucleotide, e. g., by selecting a double-stranded DNA or double-stranded DNA/RNA hybrid donor molecule having one blunt end and one terminus with unpaired nucleotides, such that the polynucleotide is integrated preferably in one orientations. In another embodiment, two DSBs, each having an overhang, are introduced into a genome, resulting in excision or deletion of genomic sequence between the sites of the two DSBs, and a sequence encoded by a double-stranded DNA or double-stranded DNA/RNA hybrid donor molecule that has an overhang at each terminus (or, alternatively, a single-stranded DNA or a single-stranded DNA/RNA hybrid donor molecule) is integrated into the genome between the two DSBs. The length of genomic sequence that is deleted between two DSBs and the length of a sequence encoded by the polynucleotide donor molecule that is integrated in place of the deleted genomic sequence can be, but need not be equal. In embodiments, the distance between any two DSBs (or the length of the genomic sequence that is to be deleted) is at least 10, at least 15, at least 20, at least 25, at least 30, at least 40, at least 50, at least 60, at least 70, at least 80, or at least 100 nucleotides; in other embodiments the distance between any two DSBs (or the length of the genomic sequence that is to be deleted) is at least 100, at least 150, at least 200, at least 300, at least 400, at least 500, at least 600, at least 750, or at least 1000 nucleotides. In embodiments where more than two DSBs are introduced into genomic sequence, it is possible to effect different deletions of genomic sequence (for example, where three DSBs are introduced, genomic sequence can be deleted between the first and second DSBs, between the first and third DSBs, and between the second and third DSBs). In some embodiments, a sequence encoded by more than one polynucleotide donor molecule (e. g., multiple copies of a sequence encoded by a polynucleotide donor molecule having a given sequence, or multiple sequences encoded by polynucleotide donor molecules with two or more different sequences) is integrated into the genome. For example, different sequences encoded by individual polynucleotide donor molecules can be individually integrated at a single locus where genomic sequence has been deleted between two DSBs, or at multiple locations where genomic sequence has been deleted (e. g., where more than two DSBs have been introduced into the genome). In embodiments, at least one exon is replaced by integrating a sequence encoded by at least one polynucleotide molecule where genomic sequence is deleted between DSBs that were introduced by at least one sequence-specific nuclease into intronic sequence flanking the at least one exon; an advantage of this approach over an otherwise similar method (i. e., differing by having the DSBs introduced into coding sequence instead of intronic sequence) is the avoidance of inaccuracies (nucleotide changes, deletions, or additions at the nuclease cleavage sites) in the resulting exon sequence or messenger RNA.

[0106] In embodiments, the methods described herein are used to delete or replace genomic sequence, which can be a relatively large sequence (e. g., all or part of at least one exon or of a protein domain) resulting in the equivalent of an alternatively spliced transcript. Additional related aspects include compositions and reaction mixtures including a plant cell or a plant protoplast and at least two guide RNAs, wherein each guide RNA is designed to effect a DSB in intronic sequence flanking at least one exon; such compositions and reaction mixtures optionally include at least one sequence-specific nuclease capable of being guided by at least one of the guide RNAs to effect a DSB in genomic sequence, and optionally include a polynucleotide donor molecule that is capable of being integrated (or having its sequence integrated) into the genome at the location of at least one DSB or at the location of genomic sequence that is deleted between the DSBs.

[0107] Donor Polynucleotide Molecules: Embodiments of the polynucleotide donor molecule having a sequence that is integrated at the site of at least one double-strand break (DSB) in a genome include double-stranded DNA, a single-stranded DNA, a single-stranded DNA/RNA hybrid, and a double-stranded DNA/RNA hybrid. In embodiments, a polynucleotide donor molecule that is a double-stranded (e. g., a dsDNA or dsDNA/RNA hybrid) molecule is provided directly to the plant protoplast or plant cell in the form of a double-stranded DNA or a double-stranded DNA/RNA hybrid, or as two single-stranded DNA (ssDNA) molecules that are capable of hybridizing to form dsDNA, or as a single-stranded DNA molecule and a single-stranded RNA (ssRNA) molecule that are capable of hybridizing to form a double-stranded DNA/RNA hybrid; that is to say, the double-stranded polynucleotide molecule is not provided indirectly, for example, by expression in the cell of a dsDNA encoded by a plasmid or other vector. In various non-limiting embodiments of the method, the polynucleotide donor molecule that is integrated (or that has a sequence that is integrated) at the site of at least one double-strand break (DSB) in a genome is double-stranded and blunt-ended; in other embodiments the polynucleotide donor molecule is double-stranded and has an overhang or “sticky end” consisting of unpaired nucleotides (e. g., 1, 2, 3, 4, 5, or 6 unpaired nucleotides) at one terminus or both termini. In an embodiment, the DSB in the genome has no unpaired nucleotides at the cleavage site, and the polynucleotide donor molecule that is integrated (or that has a sequence that is integrated) at the site of the DSB is a blunt-ended double-stranded DNA or blunt-ended double-stranded DNA/RNA hybrid molecule, or alternatively is a single-stranded DNA or a single-stranded DNA/RNA hybrid molecule. In another embodiment, the DSB in the genome has one or more unpaired nucleotides at one or both sides of the cleavage site, and the polynucleotide donor molecule that is integrated (or that has a sequence that is integrated) at the site of the DSB is a double-stranded DNA or double-stranded DNA/RNA hybrid molecule with an overhang or “sticky end” consisting of unpaired nucleotides at one or both termini, or alternatively is a single-stranded DNA or a single-stranded DNA/RNA hybrid molecule; in embodiments, the polynucleotide donor molecule DSB is a double-stranded DNA or double-stranded DNA/RNA hybrid molecule that includes an overhang at one or at both termini, wherein the overhang consists of the same number of unpaired nucleotides as the number of unpaired nucleotides created at the site of a DSB by a nuclease that cuts in an off-set fashion (e. g., where a Cpf1 nuclease effects an off-set DSB with 5-nucleotide overhangs in the genomic sequence, the polynucleotide donor molecule that is to be integrated (or that has a sequence that is to be integrated) at the site of the DSB is double-stranded and has 5 unpaired nucleotides at one or both termini). Generally, one or both termini of the polynucleotide donor molecule contain no regions of sequence homology (identity or complementarity) to genomic regions flanking the DSB; that is to say, one or both termini of the polynucleotide donor molecule contain no regions of sequence that is sufficiently complementary to permit hybridization to genomic regions immediately adjacent to the location of the DSB. In embodiments, the polynucleotide donor molecule contains no homology to the locus of the DSB, that is to say, the polynucleotide donor molecule contains no nucleotide sequence that is sufficiently complementary to permit hybridization to genomic regions immediately adjacent to the location of the DSB. In an embodiment, the polynucleotide donor molecule that is integrated at the site of at least one double-strand break (DSB) includes between 2-20 nucleotides in one (if single-stranded) or in both strands (if double-stranded), e. g., 2, 3, 4, 5, 6, 7, 8, 9, 10, 11, 12, 13, 14, 15, 16, 17, 18, 19, or 20 nucleotides on one or on both strands, each of which can be base-paired to a nucleotide on the opposite strand (in the case of a perfectly base-paired double-stranded polynucleotide molecule). In embodiments, the polynucleotide donor molecule is at least partially double-stranded and includes 2-20 base-pairs, e. g., 2, 3, 4, 5, 6, 7, 8, 9, 10, 11, 12, 13, 14, 15, 16, 17, 18, 19, or 20 base-pairs; in embodiments, the polynucleotide donor molecule is double-stranded and blunt-ended and consists of 2-20 base-pairs, e. g., 2, 3, 4, 5, 6, 7, 8, 9, 10, 11, 12, 13, 14, 15, 16, 17, 18, 19, or 20 base-pairs; in other embodiments, the polynucleotide donor molecule is double-stranded and includes 2-20 base-pairs, e. g., 2, 3, 4, 5, 6, 7, 8, 9, 10, 11, 12, 13, 14, 15, 16, 17, 18, 19, or 20 base-pairs and in addition has at least one overhang or “sticky end” consisting of at least one additional, unpaired nucleotide at one or at both termini. Non-limiting examples of such relatively small polynucleotide donor molecules of 20 or fewer base-pairs (if double-stranded) or 20 or fewer nucleotides (if single-stranded) include polynucleotide donor molecules that have at least one strand including a transcription factor recognition site sequence (e. g., such as the sequences of transcription factor recognition sites provided in the working Examples), or that have at least one strand including a small RNA recognition site, or that have at least one strand including a recombinase recognition site. In an embodiment, the polynucleotide donor molecule that is integrated (or that has a sequence that is integrated) at the site of at least one double-strand break (DSB) in a genome is a blunt-ended double-stranded DNA or a blunt-ended double-stranded DNA/RNA hybrid molecule of about 18 to about 300 base-pairs, or about 20 to about 200 base-pairs, or about 30 to about 100 base-pairs, and having at least one phosphorothioate bond between adjacent nucleotides at a 5′ end, 3′ end, or both 5′ and 3′ ends. In embodiments, the polynucleotide donor molecule includes single strands of at least 11, at least 18, at least 20, at least 30, at least 40, at least 60, at least 80, at least 100, at least 120, at least 140, at least 160, at least 180, at least 200, at least 240, at about 280, or at least 320 nucleotides. In embodiments, the polynucleotide donor molecule has a length of at least 2, at least 3, at least 4, at least 5, at least 6, at least 7, at least 8, at least 9, at least 10, or at least 11 base-pairs if double-stranded (or nucleotides if single-stranded), or between about 2 to about 320 base-pairs if double-stranded (or nucleotides if single-stranded), or between about 2 to about 500 base-pairs if double-stranded (or nucleotides if single-stranded), or between about 5 to about 500 base-pairs if double-stranded (or nucleotides if single-stranded), or between about 5 to about 300 base-pairs if double-stranded (or nucleotides if single-stranded), or between about 11 to about 300 base-pairs if double-stranded (or nucleotides if single-stranded), or about 18 to about 300 base-pairs if double-stranded (or nucleotides if single-stranded), or between about 30 to about 100 base-pairs if double-stranded (or nucleotides if single-stranded). In embodiments, the polynucleotide donor molecule includes chemically modified nucleotides (see, e. g., the various modifications of internucleotide linkages, bases, and sugars described in Verma and Eckstein (1998) Annu. Rev. Biochem., 67:99-134); in embodiments, the naturally occurring phosphodiester backbone of the polynucleotide donor molecule is partially or completely modified with phosphorothioate, phosphorodithioate, or methylphosphonate internucleotide linkage modifications, or the polynucleotide donor molecule includes modified nucleoside bases or modified sugars, or the polynucleotide donor molecule is labelled with a fluorescent moiety (e. g., fluorescein or rhodamine or a fluorescent nucleoside analogue) or other detectable label (e. g., biotin or an isotope). In an embodiment, the polynucleotide donor molecule is double-stranded and perfectly base-paired through all or most of its length, with the possible exception of any unpaired nucleotides at either terminus or both termini. In another embodiment, the polynucleotide donor molecule is double-stranded and includes one or more non-terminal mismatches or non-terminal unpaired nucleotides within the otherwise double-stranded duplex. In another embodiment, the polynucleotide donor molecule contains secondary structure that provides stability or acts as an aptamer. Other related embodiments include double-stranded DNA/RNA hybrid molecules, single-stranded DNA/RNA hybrid donor molecules, and single-stranded DNA donor molecules (including single-stranded, chemically modified DNA donor molecules), which in analogous procedures are integrated (or have a sequence that is integrated) at the site of a double-strand break.

[0108] In embodiments of the method, the polynucleotide (such as a double-stranded DNA, a single-stranded DNA, a single-stranded DNA/RNA hybrid, or a double-stranded DNA/RNA hybrid) donor molecule that is integrated at the site of at least one double-strand break (DSB) in a genome includes nucleotide sequence(s) on one or on both strands that provide a desired functionality when the polynucleotide is integrated into the genome. In various non-limiting embodiments of the method, the sequence encoded by a donor polynucleotide that is inserted at the site of at least one double-strand break (DSB) in a genome includes at least one sequence selected from the group consisting of:
[0109] (a) DNA encoding at least one stop codon, or at least one stop codon on each strand, or at least one stop codon within each reading frame on each strand;
[0110] (b) DNA encoding heterologous primer sequence (e. g., a sequence of about 18 to about 22 contiguous nucleotides, or of at least 18 contiguous nucleotides, that can be used to initiate DNA polymerase activity at the site of the DSB);
[0111] (c) DNA encoding a unique identifier sequence (e. g., a sequence that when inserted at the DSB creates a heterologous sequence that can be used to identify the presence of the insertion);
[0112] (d) DNA encoding a transcript-stabilizing sequence;
[0113] (e) DNA encoding a transcript-destabilizing sequence;
[0114] (f) a DNA aptamer or DNA encoding an RNA aptamer or amino acid aptamer; and
[0115] (g) DNA that includes or encodes a sequence recognizable by a specific binding agent.

[0116] In an embodiment, the sequence encoded by the polynucleotide (such as a double-stranded DNA, a single-stranded DNA, a single-stranded DNA/RNA hybrid, or a double-stranded DNA/RNA hybrid) donor molecule that is integrated at the site of at least one double-strand break (DSB) in a genome includes DNA encoding at least one stop codon, or at least one stop codon on each strand, or at least one stop codon within each reading frame on each strand. Such sequence encoded by a polynucleotide donor molecule, when integrated at a DSB in a genome can be useful for disrupting the expression of a sequence of interest, such as a protein-coding gene. An example of such a polynucleotide donor molecule is a double-stranded DNA, a single-stranded DNA, a single-stranded DNA/RNA hybrid, or a double-stranded DNA/RNA hybrid donor molecule, of at least 18 contiguous base-pairs if double-stranded or at least 11 contiguous nucleotides if single-stranded, and encoding at least one stop codon in each possible reading frame on either strand. Another example of such a polynucleotide donor molecule is a double-stranded DNA or double-stranded DNA/RNA hybrid donor molecule wherein each strand includes at least 18 and fewer than 200 contiguous base-pairs, wherein the number of base-pairs is not divisible by 3, and wherein each strand encodes at least one stop codon in each possible reading frame in the 5′ to 3′ direction. Another example of such a polynucleotide donor molecule is a single-stranded DNA or single-stranded DNA/RNA hybrid donor molecule wherein each strand includes at least 11 and fewer than about 300 contiguous nucleotides, wherein the number of base-pairs is not divisible by 3, and wherein the polynucleotide donor molecule encodes at least one stop codon in each possible reading frame in the 5′ to 3′ direction.

[0117] In an embodiment, the polynucleotide (such as a double-stranded DNA, a single-stranded DNA, a single-stranded DNA/RNA hybrid, or a double-stranded DNA/RNA hybrid) donor molecule that is integrated (or that has a sequence that is integrated) at the site of at least one double-strand break (DSB) in a genome includes DNA encoding heterologous primer sequence (e. g., a sequence of about 18 to about 22 contiguous nucleotides, or of at least 18, at least 20, or at least 22 contiguous nucleotides that can be used to initiate DNA polymerase activity at the site of the DSB). Heterologous primer sequence can further include nucleotides of the genomic sequence directly flanking the site of the DSB.

[0118] In an embodiment, the polynucleotide (such as a double-stranded DNA, a single-stranded DNA, a single-stranded DNA/RNA hybrid, or a double-stranded DNA/RNA hybrid) donor molecule that is integrated (or that has a sequence that is integrated) at the site of at least one double-strand break (DSB) in a genome includes nucleotides encoding a unique identifier sequence (e. g., a sequence that when inserted at the DSB creates a heterologous sequence that can be used to identify the presence of the insertion)

[0119] In an embodiment, the polynucleotide (such as a double-stranded DNA, a single-stranded DNA, a single-stranded DNA/RNA hybrid, or a double-stranded DNA/RNA hybrid) donor molecule that is integrated (or that has a sequence that is integrated) at the site of at least one double-strand break (DSB) in a genome includes nucleotides encoding a transcript-stabilizing sequence. In an example, sequence of a double-stranded or single-stranded DNA or a DNA/RNA hybrid donor molecule encoding a 5′ terminal RNA-stabilizing stem-loop (see, e. g., Suay (2005) Nucleic Acids Rev., 33:4754-4761) is integrated at a DSB located 5′ to the sequence for which improved transcript stability is desired. In another embodiment, the polynucleotide donor molecule that is integrated (or that has a sequence that is integrated) at the site of at least one double-strand break (DSB) in a genome includes nucleotides encoding a transcript-destabilizing sequence such as the SAUR destabilizing sequences described in detail in U. S. Patent Application Publication 2007/0011761, incorporated herein by reference.

[0120] In an embodiment, the polynucleotide (such as a double-stranded DNA, a single-stranded DNA, a single-stranded DNA/RNA hybrid, or a double-stranded DNA/RNA hybrid) donor molecule that is integrated (or that has a sequence that is integrated) at the site of at least one double-strand break (DSB) in a genome includes a DNA aptamer or DNA encoding an RNA aptamer or amino acid aptamer. Nucleic acid (DNA or RNA) aptamers are single- or double-stranded nucleotides that bind specifically to molecules or ligands which include small molecules (e. g., secondary metabolites such as alkaloids, terpenes, flavonoids, and other small molecules, as well as larger molecules such as polyketides and non-ribosomal proteins), proteins, other nucleic acid molecules, and inorganic compounds. Introducing an aptamer at a specific location in the genome is useful, e. g., for adding binding specificity to an enzyme or for placing expression of a transcript or activity of an encoded protein under ligand-specific control. In an example, the polynucleotide donor molecule encodes a poly-histidine “tag” which is integrated at a DSB downstream of a protein or protein subunit, enabling the protein expressed from the resulting transcript to be purified by affinity to nickel, e. g., on nickel resins; in an embodiments, the polynucleotide donor molecule encodes a 6×-His tag, a 10×-His tag, or a 10×-His tag including one or more stop codons following the histidine-encoding codons, where the last is particularly useful when integrated downstream of a protein or protein subunit lacking a stop codon (see, e. g., parts[dot]igem[dot]org/Part:BBa_K844000). In embodiments, the polynucleotide donor molecule encodes a riboswitch, wherein the riboswitch includes both an aptamer which changes its conformation in the presence or absence of a specific ligand, and an expression-controlling region that turns expression on or off, depending on the conformation of the aptamer. See, for example, the regulatory RNA molecules containing ligand-specific aptamers described in U. S. Patent Application Publication 2013/0102651 and the various riboswitches described in U. S. Patent Application Publication 2005/0053951, both of which publications are incorporated herein by reference.

[0121] In an embodiment, the polynucleotide (such as a double-stranded DNA, a single-stranded DNA, a single-stranded DNA/RNA hybrid, or a double-stranded DNA/RNA hybrid) donor molecule that is integrated (or that has a sequence that is integrated) at the site of at least one double-strand break (DSB) in a genome includes nucleotides that include or encode a sequence recognizable by (i. e., binds to) a specific binding agent. Non-limiting embodiments of specific binding agents include nucleic acids, peptides or proteins, non-peptide/non-nucleic acid ligands, inorganic molecules, and combinations thereof; specific binding agents also include macromolecular assemblages such as lipid bilayers, cell components or organelles, and even intact cells or organisms. In embodiments, the specific binding agent is an aptamer or riboswitch, or alternatively is recognized by an aptamer or a riboswitch. In an embodiment, the invention provides a method of changing expression of a sequence of interest in a genome, comprising integrating a polynucleotide molecule at the site of a DSB in a genome, wherein the polynucleotide donor molecule includes a sequence recognizable by a specific binding agent, wherein the integrated sequence encoded by the polynucleotide donor molecule is functionally or operably linked to a sequence of interest, and wherein contacting the integrated sequence encoded by the polynucleotide donor molecule with the specific binding agent results in a change of expression of the sequence of interest; in embodiments, sequences encoded by different polynucleotide donor molecules are integrated at multiple DSBs in a genome.

[0122] In an embodiment, the polynucleotide (such as a double-stranded DNA, a single-stranded DNA, a single-stranded DNA/RNA hybrid, or a double-stranded DNA/RNA hybrid) donor molecule that is integrated (or that has a sequence that is integrated) at the site of at least one double-strand break (DSB) in a genome includes nucleotides that include or encode a sequence recognizable by (i. e., binds to) a specific binding agent, wherein:
[0123] (a) the sequence recognizable by a specific binding agent includes an auxin response element (AuxRE) sequence, the specific binding agent is an auxin, and the change of expression is upregulation; see, e. g., Walker and Estelle (1998) Curr. Opinion Plant Biol., 1:434-439;
[0124] (b) the sequence recognizable by a specific binding agent includes at least one D1-4 sequence (CCTCGTGTCTC, SEQ ID NO:328; see Ulmasov et al. (1997) Plant Cell, 9:1963-1971), the specific binding agent is an auxin, and the change of expression is upregulation;
[0125] (c) the sequence recognizable by a specific binding agent includes at least one DR5 sequence (CCTTTTGTCTC, SEQ ID NO:329; see Ulmasov et al. (1997) Plant Cell, 9:1963-1971), the specific binding agent is an auxin, and the change of expression is upregulation;
[0126] (d) the sequence recognizable by a specific binding agent includes at least one m5-DR5 sequence (CCTTTTGTCNC, wherein N is A, C, or G, SEQ ID NO:330; see Ulmasov et al. (1997) Plant Cell, 9:1963-1971), the specific binding agent is an auxin, and the change of expression is upregulation;
[0127] (e) the sequence recognizable by a specific binding agent includes at least one P3 sequence (TGTCTC, SEQ ID NO:331), the specific binding agent is an auxin, and the change of expression is upregulation;
[0128] (f) the sequence recognizable by a specific binding agent includes a small RNA recognition site sequence, the specific binding agent is the corresponding small RNA (e. g., an siRNA, a microRNA (miRNA), a trans-acting siRNA as described in U.S. Pat. No. 8,030,473, or a phased sRNA as described in U.S. Pat. No. 8,404,928; both of these cited patents are incorporated by reference herein), and the change of expression is downregulation (non-limiting examples are given below, under the heading “Small RNAs”);
[0129] (g) the sequence recognizable by a specific binding agent includes a microRNA (miRNA) recognition site sequence, the specific binding agent is the corresponding mature miRNA, and the change of expression is downregulation (non-limiting examples are given below, under the heading “Small RNAs”);
[0130] (h) the sequence recognizable by a specific binding agent includes a microRNA (miRNA) recognition sequence for an engineered miRNA, the specific binding agent is the corresponding engineered mature miRNA, and the change of expression is downregulation;
[0131] (i) the sequence recognizable by a specific binding agent includes a transposon recognition sequence, the specific binding agent is the corresponding transposon, and the change of expression is upregulation or downregulation;
[0132] (j) the sequence recognizable by a specific binding agent includes an ethylene-responsive element binding-factor-associated amphiphilic repression (EAR) motif (LxLxL, SEQ ID NO:332 or DLNxxP, SEQ ID NO:333) sequence (see, e. g., Ragale and Rozwadowski (2011) Epigenetics, 6:141-146), the specific binding agent is ERF (ethylene-responsive element binding factor) or co-repressor (e. g., TOPLESS (TPL)), and the change of expression is downregulation;
[0133] (k) the sequence recognizable by a specific binding agent includes a splice site sequence (e. g., a donor site, a branching site, or an acceptor site; see, for example, the splice sites and splicing signals publicly available at the ERIS database, lemur[dot]amu[dot]edu[dot]pl/share/ERISdb/home.html), the specific binding agent is a spliceosome, and the change of expression is expression of an alternatively spliced transcript (in some cases, this can include deletion of a relatively large genomic sequence, such as deletion of all or part of an exon or of a protein domain);
[0134] (l) the sequence recognizable by a specific binding agent includes a recombinase recognition site sequence that is recognized by a site-specific recombinase, the specific binding agent is the corresponding site-specific recombinase, and the change of expression is upregulation or downregulation or expression of a transcript having an altered sequence (for example, expression of a transcript that has had a region of DNA excised by the recombinase) (non-limiting examples are given below, under the heading “Recombinases and Recombinase Recognition Sites”);
[0135] (m) the sequence recognizable by a specific binding agent includes sequence encoding an RNA or amino acid aptamer or an RNA riboswitch, the specific binding agent is the corresponding ligand, and the change in expression is upregulation or downregulation;
[0136] (n) the sequence recognizable by a specific binding agent is a hormone responsive element (e. g., a nuclear receptor, or a hormone-binding domain thereof), the specific binding agent is a hormone, and the change in expression is upregulation or downregulation; or
[0137] (o) the sequence recognizable by a specific binding agent is a transcription factor binding sequence, the specific binding agent is the corresponding transcription factor, and the change in expression is upregulation or downregulation (non-limiting examples are given below, under the heading “Transcription Factors”).

[0138] In embodiments, the polynucleotide (such as a double-stranded DNA, a single-stranded DNA, a single-stranded DNA/RNA hybrid, or a double-stranded DNA/RNA hybrid) donor molecule that is integrated (or that has a sequence that is integrated) at the site of at least one double-strand break (DSB) in a genome includes a nucleotide sequence that encodes an RNA molecule or an amino acid sequence that is recognizable by a specific binding agent. In embodiments, the polynucleotide donor molecule includes a nucleotide sequence that binds specifically to a ligand or that encodes an RNA molecule or an amino acid sequence that binds specifically to a ligand. In embodiments, the polynucleotide donor molecule encodes at least one stop codon on each strand, or encodes at least one stop codon within each reading frame on each strand.

[0139] In embodiments, the polynucleotide (such as a double-stranded DNA, a single-stranded DNA, a single-stranded DNA/RNA hybrid, or a double-stranded DNA/RNA hybrid) donor molecule includes at least partially self-complementary sequence, such that the polynucleotide donor molecule encodes a transcript that is capable of forming at least partially double-stranded RNA. In embodiments, the at least partially double-stranded RNA is capable of forming secondary structure containing at least one stem-loop (i. e., a substantially or perfectly double-stranded RNA “stem” region and a single-stranded RNA “loop” connecting opposite strands of the dsRNA stem. In embodiments, the at least partially double-stranded RNA is cleavable by a Dicer or other ribonuclease. In embodiments, the at least partially double-stranded RNA includes an aptamer or a riboswitch; see, e. g., the RNA aptamers described in U. S. Patent Application Publication 2013/0102651, which is incorporated herein by reference.

[0140] In embodiments, the polynucleotide (such as a double-stranded DNA, a single-stranded DNA, a single-stranded DNA/RNA hybrid, or a double-stranded DNA/RNA hybrid) donor molecule that is integrated (or that has a sequence that is integrated) at the site of at least one double-strand break (DSB) in a genome includes or encodes a nucleotide sequence that is responsive to a specific change in the physical environment (e. g., a change in light intensity or quality, a change in temperature, a change in pressure, a change in osmotic concentration, a change in day length, or addition or removal of a ligand or specific binding agent), wherein exposing the integrated polynucleotide sequence to the specific change in the physical environment results in a change of expression of the sequence of interest. In embodiments, the polynucleotide donor molecule includes a nucleotide sequence encoding an RNA molecule or an amino acid sequence that is responsive to a specific change in the physical environment. In a non-limiting example, the polynucleotide donor molecule encodes an amino acid sequence that is responsive to light, oxygen, redox status, or voltage, such as a Light-Oxygen-Voltage (LOV) domain (see, e. g., Peter et al. (2010) Nature Communications, doi:10.1038/ncomms1121) or a PAS domain (see, e. g., Taylor and Zhulin (1999) Microbiol. Mol. Biol. Reviews, 63:479-506), proteins containing such domains, or sub-domains or motifs thereof (see, e. g., the photochemically active 36-residue N-terminal truncation of the VVD protein described by Zoltowski et al. (2007) Science, 316:1054-1057). In a non-limiting embodiment, integration of a LOV domain at the site of a DSB within or adjacent to a protein-coding region is used to create a heterologous fusion protein that can be photo-activated.

[0141] Small RNAs: In an embodiment, the polynucleotide (such as a double-stranded DNA, a single-stranded DNA, a single-stranded DNA/RNA hybrid, or a double-stranded DNA/RNA hybrid) donor molecule that is integrated (or that has a sequence that is integrated) at the site of at least one double-strand break (DSB) in a genome includes DNA that includes or encodes a small RNA recognition site sequence that is recognized by a corresponding mature small RNA. Small RNAs include siRNAs, microRNAs (miRNAs), trans-acting siRNAs (ta-siRNAs) as described in U.S. Pat. No. 8,030,473, and phased small RNAs (phased sRNAs) as described in U.S. Pat. No. 8,404,928. All mature small RNAs are single-stranded RNA molecules, generally between about 18 to about 26 nucleotides in length, which are produced from longer, completely or substantially double-stranded RNA (dsRNA) precursors. For example, siRNAs are generally processed from perfectly or near-perfectly double-stranded RNA precursors, whereas both miRNAs and phased sRNAs are processed from larger precursors that contain at least some mismatched (non-base-paired) nucleotides and often substantial secondary structure such as loops and bulges in the otherwise largely double-stranded RNA precursor. Precursor molecules include naturally occurring precursors, which are often expressed in a specific (e. g., cell- or tissue-specific, temporally specific, developmentally specific, or inducible) expression pattern. Precursor molecules also include engineered precursor molecules, designed to produce small RNAs (e. g., artificial or engineered siRNAs or miRNAs) that target specific sequences; see, e. g., U.S. Pat. Nos. 7,691,995 and 7,786,350, which are incorporated herein by reference in their entirety. Thus, in embodiments, the polynucleotide (such as a double-stranded DNA, a single-stranded DNA, a single-stranded DNA/RNA hybrid, or a double-stranded DNA/RNA hybrid) donor molecule that is integrated (or that has a sequence that is integrated) at the site of at least one double-strand break (DSB) in a genome includes DNA that includes or encodes a small RNA precursor sequence designed to be processed in vivo to at least one corresponding mature small RNA. In embodiments, the polynucleotide donor molecule that is integrated (or that has a sequence that is integrated) at the site of at least one double-strand break (DSB) in a genome includes DNA that includes or encodes an engineered small RNA precursor sequence that is based on a naturally occurring “scaffold” precursor sequence but wherein the nucleotides of the encoded mature small RNA are designed to target a specific gene of interest that is different from the gene targeted by the natively encoded small RNA; in embodiments, the “scaffold” precursor sequence is one identified from the genome of a plant or a pest or pathogen of a plant; see, e. g., U.S. Pat. No. 8,410,334, which discloses transgenic expression of engineered invertebrate miRNA precursors in a plant, and which is incorporated herein by reference in its entirety.

[0142] Regardless of the pathway that generates the mature small RNA, the mechanism of action is generally similar; the mature small RNA binds in a sequence-specific manner to a small RNA recognition site located on an RNA molecule (such as a transcript or messenger RNA), and the resulting duplex is cleaved by a ribonuclease. The integration of a recognition site for a small RNA at the site of a DSB results in cleavage of the transcript including the integrated recognition site when and where the mature small RNA is expressed and available to bind to the recognition site. For example, a recognition site sequence for a mature siRNA or miRNA that is endogenously expressed only in male reproductive tissue of a plant can be integrated into a DSB, whereby a transcript containing the recognition site sequence is cleaved only where the mature siRNA or miRNA is expressed (i. e., in male reproductive tissue); this is useful, e. g., to prevent expression of a protein in male reproductive tissue such as pollen, and can be used in applications such as to induce male sterility in a plant or to prevent pollen development or shedding. Similarly, a recognition site sequence for a mature siRNA or miRNA that is endogenously expressed only in the roots of a plant can be integrated into a DSB, whereby a transcript containing the recognition site sequence is cleaved only in roots; this is useful, e. g., to prevent expression of a protein in roots. Non-limiting examples of useful small RNAs include: miRNAs having tissue-specific expression patterns disclosed in U.S. Pat. No. 8,334,430, miRNAs having temporally specific expression patterns disclosed in U.S. Pat. No. 8,314,290, miRNAs with stress-responsive expression patterns disclosed in U.S. Pat. No. 8,237,017, siRNAs having tissue-specific expression patterns disclosed in U.S. Pat. No. 9,139,838, and various miRNA recognition site sequences and the corresponding miRNAs disclosed in U. S. Patent Application Publication 2009/0293148. All of the patent publications referenced in this paragraph are incorporated herein by reference in their entirety. In embodiments, multiple edits in a genome are employed to obtain a desired phenotype or trait in plant. In an embodiment, one or more edits (addition, deletion, or substitution of one or more nucleotides) of an endogenous nucleotide sequence is made to provide a general phenotype; addition of at least one small RNA recognition site by insertion of the recognition site sequence at a DSB that is functionally linked to the edited endogenous nucleotide sequence achieves more specific control of expression of the edited endogenous nucleotide sequence. In an example, an endogenous plant 5-enolpyruvylshikimate-3-phosphate synthase (EPSPS) is edited to provide a glyphosate-resistant EPSPS; for example, suitable changes include the amino acid substitutions Threonine-102-Isoleucine (T102I) and Proline-106-Serine (P106S) in the maize EPSPS sequence identified by Genbank accession number X63374 (see, for example U.S. Pat. No. 6,762,344, incorporated herein by reference). In another example, an endogenous plant acetolactate synthase (ALS) is edited to increase resistance of the enzyme to various herbicides (e. g., sulfonylurea, imidazolinone, tirazolopyrimidine, pyrimidinylthiobenzoate, sulfonylamino-carbonyltriazolinone); for example, suitable changes include the amino acid substitutions G115, A116, P191, A199, K250, M345, D370, V565, W568, and F572 to the Nicotiana tabacum ALS enzyme as described in U.S. Pat. No. 5,605,011, which is incorporated herein by reference. The edited herbicide-tolerant enzyme, combined with integration of at least one small RNA recognition site for a small RNA (e. g., an siRNA or a miRNA) expressed only in a specific tissue (for example, miRNAs specifically expressed in male reproductive tissue or female reproductive tissue, e. g., the miRNAs disclosed in Table 6 of U.S. Pat. No. 8,334,430 or the siRNAs disclosed in U.S. Pat. No. 9,139,838, both incorporated herein by reference) at a DSB functionally linked to (e. g., in the 3′ untranslated region of) the edited herbicide-tolerant enzyme results in expression of the edited herbicide-tolerant enzyme being restricted to tissues other than those in which the small RNA is endogenously expressed, and those tissues in which the small RNA is expressed will not be resistant to herbicide application; this approach is useful, e. g., to provide male-sterile or female-sterile plants.

[0143] In other embodiments, the sequence of an endogenous genomic locus encoding one or more small RNAs (e. g., miRNAs, siRNAs, ta-siRNAs) is altered in order to express a small RNA having a sequence that is different from that of the endogenous small RNA and is designed to target a new sequence of interest (e. g., a sequence of a plant pest, plant pathogen, symbiont of a plant, or symbiont of a plant pest or pathogen). For example, the sequence of an endogenous or native genomic locus encoding a miRNA precursor can be altered in the mature miRNA and the miR* sequences, while maintaining the secondary structure in the resulting altered miRNA precursor sequence to permit normal processing of the transcript to a mature miRNA with a different sequence from the original, native mature miRNA sequence; see, for example, U.S. Pat. Nos. 7,786,350 and 8,395,023, both of which are incorporated by reference in their entirety herein, and which teach methods of designing engineered miRNAs. In embodiments, the sequence of an endogenous genomic locus encoding one or more small RNAs (e. g., miRNAs, siRNAs, ta-siRNAs) is altered in order to express one or more small RNA cleavage blockers (see, e. g., U.S. Pat. No. 9,040,774, which is incorporated by reference in its entirety herein). In embodiments, the sequence of an endogenous genomic locus is altered to encode a small RNA decoy (e. g., U.S. Pat. No. 8,946,511, which is incorporated by reference in its entirety herein). In embodiments, the sequence of an endogenous genomic locus that natively contains a small RNA (e. g., miRNA, siRNA, or ta-siRNA) recognition or cleavage site is altered to delete or otherwise mutate the recognition or cleavage site and thus decouple the genomic locus from small RNA regulation.

[0144] Recombinases and Recombinase Recognition Sites: In an embodiment, the polynucleotide (such as a double-stranded DNA, a single-stranded DNA, a single-stranded DNA/RNA hybrid, or a double-stranded DNA/RNA hybrid) donor molecule that is integrated (or that has a sequence that is integrated) at the site of at least one double-strand break (DSB) in a genome includes DNA that includes or encodes a recombinase recognition site sequence that is recognized by a site-specific recombinase, the specific binding agent is the corresponding site-specific recombinase, and the change of expression is upregulation or downregulation or expression of a transcript having an altered sequence (for example, expression of a transcript that has had a region of DNA excised by the recombinase). The term “recombinase recognition site sequence” refers to the DNA sequences (usually a pair of sequences) that are recognized by a site-specific (i. e., sequence-specific) recombinase in a process that allows the excision (or, in some cases, inversion or translocation) of the DNA located between the sequence-specific recombination sites. For instance, Cre recombinase recognizes either loxP recombination sites or lox511 recombination sites which are heterospecific, which means that loxP and lox511 do not recombine together (see, e. g., Odell et al. (1994) Plant Physiol., 106:447-458); FLP recombinase recognizes frt recombination sites (see, e. g., Lyznik et al. (1996) Nucleic Acids Res., 24:3784-3789); R recombinase recognizes Rs recombination sites (see, e. g., Onounchi et al. (1991) Nucleic Acids Res., 19:6373-6378); Dre recombinase recognizes rox sites (see, e. g., U.S. Pat. No. 7,422,889, incorporated herein by reference); and Gin recombinase recognizes gix sites (see, e. g., Maeser et al. (1991) Mol. Gen. Genet., 230:170-176). In a non-limiting example, a pair of polynucleotides encoding loxP recombinase recognition site sequences encoded by a pair of polynucleotide donor molecules are integrated at two separate DSBs; in the presence of the corresponding site-specific DNA recombinase Cre, the genomic sequence flanked on either side by the integrated loxP recognition sites is excised from the genome (for loxP sequences that are integrated in the same orientation relative to each other within the genome) or is inverted (for loxP sites that are integrated in an inverted orientation relative to each other within the genome) or is translocated (for loxP sites that are integrated on separate DNA molecules); such an approach is useful, e. g., for deletion or replacement of larger lengths of genomic sequence, for example, deletion or replacement of one or more protein domains. In embodiments, the recombinase recognition site sequences that are integrated at two separate DSBs are heterospecific, i. e., will not recombine together; for example, Cre recombinase recognizes either loxP recombination sites or lox511 recombination sites which are heterospecific relative to each other, which means that a loxP site and a lox511 site will not recombine together but only with another recombination site of its own type.

[0145] Integration of recombinase recognition sites is useful in plant breeding; in an embodiment, the method is used to provide a first parent plant having recombinase recognition site sequences heterologously integrated at two separate DSBs; crossing this first parent plant to a second parent plant that expresses the corresponding recombinase results in progeny plants in which the genomic sequence flanked on either side by the heterologously integrated recognition sites is excised from (or in some cases, inverted in) the genome. This approach is useful, e. g., for deletion of relatively large regions of DNA from a genome, for example, for excising DNA encoding a selectable or screenable marker that was introduced using transgenic techniques. Examples of heterologous arrangements or integration patterns of recombinase recognition sites and methods for their use, particularly in plant breeding, are disclosed in U.S. Pat. No. 8,816,153 (see, for example, the Figures and working examples), the entire specification of which is incorporated herein by reference.

[0146] Transcription Factors: In an embodiment, the sequence encoded by the donor polynucleotide (such as a double-stranded DNA, a single-stranded DNA, a single-stranded DNA/RNA hybrid, or a double-stranded DNA/RNA hybrid) donor molecule that is integrated (or that has a sequence that is integrated) at the site of at least one double-strand break (DSB) in a genome includes a transcription factor binding sequence, the specific binding agent is the corresponding transcription factor (or more specifically, the DNA-binding domain of the corresponding transcription factor), and the change in expression is upregulation or downregulation (depending on the type of transcription factor involved). In an embodiment, the transcription factor is an activating transcription factor or activator, and the change in expression is upregulation or increased expression increased expression (e.g., increased expression of at least 10%, 15%, 20%, 25%, 30%, 35%, 40%, 50%, 60%, 70%, 80%, 90%, 95%, 100% or greater, e.g., at least a 2-fold, 5-fold, 10-fold, 20-fold, 30-fold, 40-fold, 50-fold change, 100-fold or even 1000-fold change or greater) of a sequence of interest to which the transcription factor binding sequence, when integrated at a DSB in the genome, is operably linked. In some embodiments, expression is increased between 10-100%; between 2-fold and 5-fold; between 2 and 10-fold; between 10-fold and 50-fold; between 10-fold and a 100-fold; between 100-fold and 1000-fold; between 1000-fold and 5,000-fold; between 5,000-fold and 10,000 fold. In some embodiments, a targeted insertion may decrease expression by at least 1%, 5%, 10%, 15%, 20%, 25%, 30%, 35%, 40%, 50%, 60%, 70%, 80%, 90%, 95%, 99% or more. In another embodiment, the transcription factor is a repressing transcription factor or repressor, and the change in expression is downregulation or decreased expression (e.g., decreased expression by at least 1%, 5%, 10%, 15%, 20%, 25%, 30%, 35%, 40%, 50%, 60%, 70%, 80%, 90%, 95%, 99% or more) of a sequence of interest to which the transcription factor binding sequence when integrated at a DSB in the genome, is operably linked. Embodiments of transcription factors include hormone receptors, e. g., nuclear receptors, which include both a hormone-binding domain and a DNA-binding domain; in embodiments, the polynucleotide donor molecule that is integrated (or that has a sequence that is integrated) at the site of at least one double-strand break (DSB) in a genome includes or encodes a hormone-binding domain of a nuclear receptor or a DNA-binding domain of a nuclear receptor. Various non-limiting examples of transcription factor binding sequences and transcription factors are provided in the working Examples. In embodiments, the sequence recognizable by a specific binding agent is a transcription factor binding sequence selected from those publicly disclosed at arabidopsis[dot]med[dot]ohio-state[dot]edu/AtcisDB/bindingsites[dot]html and neomorph[dot]salk[dot]edu/dap_web/pages/index[dot]php.

[0147] To summarize, the methods described herein permit sequences encoded by donor polynucleotides to be inserted, in a non-multiplexed or multiplexed manner, into a plant cell genome for the purpose of modulating gene expression in a number of distinct ways. Gene expression can be modulated up or down, for example, by tuning expression through the insertion of enhancer elements and transcription start sequences (e.g., nitrate response elements and auxin binding elements). Conditional transcription factor binding sites can be added or modified to allow additional control. Similarly, transcript stabilizing and/or destabilizing sequences can be inserted using the methods herein. Via the targeted insertion of stop codons, RNAi cleavage sites, or sites for recombinases, the methods described herein allow the transcription of particular sequences to be selectively turned off (likewise, the targeted removal of such sequences can be used to turn gene transcription on).

[0148] The plant genome targeting methods disclosed herein also enable transcription rates to be adjusted by the modification (optimization or de-optimization) of core promoter sequences (e.g., TATAA boxes). Proximal control elements (e.g., GC boxes; CAAT boxes) can likewise be modified Enhancer or repressor motifs can be inserted or modified. Three-dimensional structural barriers in DNA that inhibit RNA polymerase can be created or removed via the targeted insertion of sequences, or by the modification of existing sequences. Where intron mediated enhancement is known to affect transcript rate, the relevant rate-affecting sequences can be optimized or de-optimized (by insertion of additional sequences or modification of existing sequences) to further enhance or diminish transcription. Through the insertion or modification of sequences using the targeting methods described herein (including multiplexed targeting methods), mRNA stability and processing can be modulated (thereby modulating gene expression). For example, mRNA stabilizing or destabilizing motifs can be inserted, removed or modified; mRNA splicing donor/acceptor sites can be inserted, removed or modified and, in some instance, create the possibility of increased control over alternate splicing. Similarly, miRNA binding sites can be added, removed or modified using the methods described herein. Epigenetic regulation of transcription can also be adjusted according to the methods described herein (e.g., by increasing or decreasing the degree of methylation of DNA, or the degree of methylation or acetylation of histones). Epigenetic regulation using the tools and methods described herein can be combined with other methods for modifying genetic sequences described herein, for the purpose of modifying a trait of a plant cell or plant, or for creating populations of modified cells and cells from which desired phenotypes can be selected.

[0149] The plant genome targeting methods described herein can also be used to modulate translation efficiency by, e.g., modifying codon usage towards or away from a particular plant cell's bias. Similarly, through the use of the targeting methods described herein, KOZAK sequences can be optimized or deoptimized, mRNA folding and structures affecting initiation of translation can be altered, and upstream reading frames can be created or destroyed. Through alteration of coding sequences using the targeted genome modification methods described herein, the abundance and/or activity of translated proteins can be adjusted. For example, the amino acid sequences in active sites or functional sites of proteins can be modified to increase or decrease the activity of the protein as desired; in addition, or alternatively, protein stabilizing or destabilizing motifs can be added or modified. All of the gene expression and activity modification schemes described herein can be utilized in various combinations to fine-tune gene expression and activity. Using the multiplexed targeting methods described herein, a plurality of specific targeted modifications can be achieved in a plant cell without intervening selection or sequencing steps.

### Modified Plant Cells Comprising Specifically Targeted and Modified Genomes

[0150] Another aspect of the invention includes the cell, such as a plant cell, provided by the methods disclosed herein. In an embodiment, a plant cell thus provided includes in its genome a heterologous DNA sequence that includes: (a) nucleotide sequence of a polynucleotide (such as a double-stranded DNA, a single-stranded DNA, a single-stranded DNA/RNA hybrid, or a double-stranded DNA/RNA hybrid) molecule integrated at the site of a DSB in a genome; and (b) genomic nucleotide sequence adjacent to the site of the DSB. In embodiments, the methods disclosed herein for integrating a sequence encoded by a polynucleotide donor molecule into the site of a DSB are applied to a plant cell (e. g., a plant cell or plant protoplast isolated from a whole plant or plant part or plant tissue, or an isolated plant cell or plant protoplast in suspension or plate culture); in other embodiments, the methods are applied to non-isolated plant cells in situ or in planta, such as a plant cell located in an intact or growing plant or in a plant part or tissue. The methods disclosed herein for integrating a sequence encoded by a polynucleotide donor molecule into the site of a DSB are also useful in introducing heterologous sequence at the site of a DSB induced in the genome of other photosynthetic eukaryotes (e. g., green algae, red algae, diatoms, brown algae, and dinoflagellates). In embodiments, the plant cell or plant protoplast is capable of division and further differentiation. In embodiments, the plant cell or plant protoplast is obtained or isolated from a plant or part of a plant selected from the group consisting of a plant tissue, a whole plant, an intact nodal bud, a shoot apex or shoot apical meristem, a root apex or root apical meristem, lateral meristem, intercalary meristem, a seedling (e. g., a germinating seed or small seedling or a larger seedling with one or more true leaves), a whole seed (e. g., an intact seed, or a seed with part or all of its seed coat removed or treated to make permeable), a halved seed or other seed fragment, a zygotic or somatic embryo (e. g., a mature dissected zygotic embryo, a developing zygotic or somatic embryo, a dry or rehydrated or freshly excised zygotic embryo), pollen, microspores, epidermis, flower, and callus.

[0151] In some embodiments, the method includes the additional step of growing or regenerating a plant from a plant cell containing the heterologous DNA sequence of the polynucleotide donor molecule integrated at the site of a DSB and genomic nucleotide sequence adjacent to the site of the DSB, wherein the plant includes at least some cells that contain the heterologous DNA sequence of the polynucleotide donor molecule integrated at the site of a DSB and genomic nucleotide sequence adjacent to the site of the DSB. In embodiments, callus is produced from the plant cell, and plantlets and plants produced from such callus. In other embodiments, whole seedlings or plants are grown directly from the plant cell without a callus stage. Thus, additional related aspects are directed to whole seedlings and plants grown or regenerated from the plant cell or plant protoplast containing sequence encoded by a polynucleotide (such as a double-stranded DNA, a single-stranded DNA, a single-stranded DNA/RNA hybrid, or a double-stranded DNA/RNA hybrid) donor molecule heterologously integrated at the site of a DSB, as well as the seeds of such plants; embodiments include whole seedlings and plants grown or regenerated from the plant cell or plant protoplast containing sequence encoded by a polynucleotide donor molecule heterologously integrated at the site of two or more DSBs, as well as the seeds of such plants. In embodiments, the grown or regenerated plant exhibits a phenotype associated with the sequence encoded by a polynucleotide donor molecule heterologously integrated at the site of a DSB. In embodiments, the grown or regenerated plant includes in its genome two or more genetic modifications that in combination provide at least one phenotype of interest, wherein at least one of the two or more genetic modifications includes the sequence encoded by a polynucleotide donor molecule heterologously integrated at the site of a DSB in the genome, or wherein the two or more genetic modifications include sequence encoded by at least one polynucleotide donor heterologously integrated at two or more DSBs in the genome, or wherein the two or more genetic modifications include sequences encoded by multiple polynucleotides donor molecules heterologously integrated at different DSBs in the genome. In embodiments, a heterogeneous population of plant cells or plant protoplasts, at least some of which include sequence encoded by at least one polynucleotide donor molecule heterologously integrated at the site of a DSB, is provided by the method; related aspects include a plant having a phenotype of interest associated with sequence encoded by the polynucleotide donor molecule heterologously integrated at the site of a DSB, provided by either regeneration of a plant having the phenotype of interest from a plant cell or plant protoplast selected from the heterogeneous population of plant cells or plant protoplasts, or by selection of a plant having the phenotype of interest from a heterogeneous population of plants grown or regenerated from the population of plant cells or plant protoplasts. Examples of phenotypes of interest include (but are not limited to) herbicide resistance; improved tolerance of abiotic stress (e. g., tolerance of temperature extremes, drought, or salt) or biotic stress (e. g., resistance to bacterial or fungal pathogens); improved utilization of nutrients or water; synthesis of new or modified amounts of lipids, carbohydrates, proteins or other chemicals, including medicinal compounds; improved flavour or appearance; improved photosynthesis; improved storage characteristics (e. g., resistance to bruising, browning, or softening); increased yield; altered morphology (e. g., floral architecture or colour, plant height, branching, root structure); and changes in flowering time. In an embodiment, a heterogeneous population of plant cells or plant protoplasts (or seedlings or plants grown or regenerated therefrom) is exposed to conditions permitting expression of the phenotype of interest; e. g., selection for herbicide resistance can include exposing the population of plant cells or plant protoplasts (or seedlings or plants) to an amount of herbicide or other substance that inhibits growth or is toxic, allowing identification and selection of those resistant plant cells or plant protoplasts (or seedlings or plants) that survive treatment. In certain embodiments, a proxy measurement can be taken of an aspect of a modified plant or plant cell, where the measurement is indicative of a desired phenotype or trait. For example, the modification of one or more targeted sequences in a genome may provide a measurable change in a molecule (e.g., a detectable change in the structure of a molecule, or a change in the amount of the molecule that is detected, or the presence or absence of a molecule) that can be used as a biomarker for a presence of a desired phenotype or trait. The proper insertion of an enhancer for increasing expression of an enzyme, for example, may be determined by detecting lower levels of the enyzme's substrate.

[0152] In some embodiments, modified plants are produced from cells modified according to the methods described herein without a tissue culturing step. In certain embodiments, the modified plant cell or plant does not have significant losses of methylation compared to a non-modified parent plant cell or plant. For example, the modified plant lacks significant losses of methylation in one or more promoter regions relative to the parent plant cell or plant. Similarly, in certain embodiments, an modified plant or plant cell obtained using the methods described herein lacks significant losses of methylation in protein coding regions relative to the parent cell or parent plant before modification using the modifying methods described herein.

[0153] Also contemplated are new heterogeneous populations, arrays, or libraries of plant cells and plants created by the introduction of targeted modifications at one more locations in the genome. Plant compositions of the invention include succeeding generations or seeds of modified plants that are grown or regenerated from plant cells or plant protoplasts modified according to the methods herein, as well as parts of those plants (including plant parts used in grafting as scions or rootstocks), or products (e. g., fruits or other edible plant parts, cleaned grains or seeds, edible oils, flours or starches, proteins, and other processed products) made from these plants or their seeds. Embodiments include plants grown or regenerated from the plant cells or plant protoplasts, wherein the plants contain cells or tissues that do not have sequence encoded by the polynucleotide donor molecule heterologously integrated at the site of a DSB, e. g., grafted plants in which the scion or rootstock contains sequence encoded by the polynucleotide donor molecule heterologously integrated at the site of a DSB, or chimeric plants in which some but not all cells or tissues contain sequence encoded by the polynucleotide donor molecule heterologously integrated at the site of a DSB. Plants in which grafting is commonly useful include many fruit trees and plants such as many citrus trees, apples, stone fruit (e. g., peaches, apricots, cherries, and plums), avocados, tomatoes, eggplant, cucumber, melons, watermelons, and grapes as well as various ornamental plants such as roses. Grafted plants can be grafts between the same or different (generally related) species. Additional related aspects include (a) a hybrid plant provided by crossing a first plant grown or regenerated from a plant cell or plant protoplast with sequence encoded by at least one polynucleotide donor molecule heterologously integrated at the site of a DSB, with a second plant, wherein the hybrid plant contains sequence encoded by the polynucleotide donor molecule heterologously integrated at the site of a DSB, and (b) a hybrid plant provided by crossing a first plant grown or regenerated from a plant cell or plant protoplast with sequence encoded by at least one polynucleotide donor molecule heterologously integrated at multiple DSB sites, with a second plant, wherein the hybrid plant contains sequence encoded by at least one polynucleotide donor molecule heterologously integrated at the site of at least one DSB; also contemplated is seed produced by the hybrid plant. Also envisioned as related aspects are progeny seed and progeny plants, including hybrid seed and hybrid plants, having the regenerated plant as a parent or ancestor. In embodiments, the plant cell (or the regenerated plant, progeny seed, and progeny plant) is diploid or polyploid. In embodiments, the plant cell (or the regenerated plant, progeny seed, and progeny plant) is haploid or can be induced to become haploid; techniques for making and using haploid plants and plant cells are known in the art, see, e. g., methods for generating haploids in Arabidopsis thaliana by crossing of a wild-type strain to a haploid-inducing strain that expresses altered forms of the centromere-specific histone CENH3, as described by Maruthachalam and Chan in “How to make haploid Arabidopsis thaliana”, a protocol publicly available at www[dot]openwetware[dot]org/images/d/d3/Haploid_Arabidopsisprotocol[dot]pdf; Ravi et al. (2014) Nature Communications, 5:5334, doi: 10.1038/ncomms6334). Examples of haploid cells include but are not limited to plant cells obtained from haploid plants and plant cells obtained from reproductive tissues, e. g., from flowers, developing flowers or flower buds, ovaries, ovules, megaspores, anthers, pollen, and microspores. In embodiments where the plant cell is haploid, the method can further include the step of chromosome doubling (e. g., by spontaneous chromosomal doubling by meiotic non-reduction, or by using a chromosome doubling agent such as colchicine, oryzalin, trifluralin, pronamide, nitrous oxide gas, anti-microtubule herbicides, anti-microtubule agents, and mitotic inhibitors) in the plant cell containing heterologous DNA sequence (i. e. sequence of the polynucleotide donor molecule integrated at the site of a DSB in the genome and genomic nucleotide sequence adjacent to the site of the DSB) to produce a doubled haploid plant cell or plant protoplast that is homozygous for the heterologous DNA sequence; yet other embodiments include regeneration of a doubled haploid plant from the doubled haploid plant cell or plant protoplast, wherein the regenerated doubled haploid plant is homozygous for the heterologous DNA sequence. Thus, aspects of the invention are related to the haploid plant cell or plant protoplast having the heterologous DNA sequence of the polynucleotide donor molecule integrated at the site of a DSB and genomic nucleotide sequence adjacent to the site of the DSB, as well as a doubled haploid plant cell or plant protoplast or a doubled haploid plant that is homozygous for the heterologous DNA sequence. Another aspect of the invention is related to a hybrid plant having at least one parent plant that is a doubled haploid plant provided by the method. Production of doubled haploid plants by these methods provides homozygosity in one generation, instead of requiring several generations of self-crossing to obtain homozygous plants; this may be particularly advantageous in slow-growing plants, such as fruit and other trees, or for producing hybrid plants that are offspring of at least one doubled-haploid plant.

[0154] Plants and plant cells that may be modified according to the methods described herein are of any species of interest, including dicots and monocots, but especially soybean species (including hybrid species).

[0155] The soybean cells and derivative plants and seeds disclosed herein can be used for various purposes useful to the consumer or grower. The intact plant itself may be desirable, e. g., plants grown as cover crops or as ornamentals. In other embodiments, processed products are made from the plant or its seeds, such as extracted proteins, oils, sugars, and starches, fermentation products, animal feed or human food, wood and wood products, pharmaceuticals, and various industrial products. Thus, further related aspects of the invention include a processed or commodity product made from a plant or seed or plant part that includes at least some cells that contain the heterologous DNA sequence including the sequence encoded by the polynucleotide donor molecule integrated at the site of a DSB and genomic nucleotide sequence adjacent to the site of the DSB. Commodity products include, but are not limited to, harvested leaves, roots, shoots, tubers, stems, fruits, seeds, or other parts of a plant, meals, oils (edible or inedible), fiber, extracts, fermentation or digestion products, crushed or whole grains or seeds of a plant, wood and wood pulp, or any food or non-food product. Detection of a heterologous DNA sequence that includes: (a) nucleotide sequence encoded by a polynucleotide donor molecule integrated at the site of a DSB in a genome; and (b) genomic nucleotide sequence adjacent to the site of the DSB in such a commodity product is de facto evidence that the commodity product contains or is derived from a plant cell, plant, or seed of this invention.

[0156] In another aspect, the invention provides a heterologous nucleotide sequence including: (a) nucleotide sequence encoded by a polynucleotide donor molecule integrated by the methods disclosed herein at the site of a DSB in a genome, and (b) genomic nucleotide sequence adjacent to the site of the DSB. Related aspects include a plasmid, vector, or chromosome including such a heterologous nucleotide sequence, as well as polymerase primers for amplification (e. g., PCR amplification) of such a heterologous nucleotide sequence.

### Compositions and Reaction Mixtures

[0157] In one aspect, the invention provides a composition including: (a) a cell; and (b) a polynucleotide (such as a double-stranded DNA, a single-stranded DNA, a single-stranded DNA/RNA hybrid, or a double-stranded DNA/RNA hybrid) donor molecule that is capable of being integrated (or having its sequence integrated) (preferably by non-homologous end-joining (NHEJ)) at one or more double-strand breaks in a genome in the cell. In many embodiments of the composition, the cell is a plant cell, e. g., an isolated plant cell or a plant protoplast, or a plant cell in a plant, plant part, plant tissue, or callus. In certain embodiments, the cell is that of a photosynthetic eukaryote (e. g., green algae, red algae, diatoms, brown algae, and dinoflagellates).

[0158] In various embodiments of the composition, the plant cell is a plant cell or plant protoplast isolated from a whole plant or plant part or plant tissue (e. g., a plant cell or plant protoplast cultured in liquid medium or on solid medium), or a plant cell located in callus, an intact plant, seed, or seedling, or in a plant part or tissue. In embodiments, the plant cell is a cell of a monocot plant or of a dicot plant. In many embodiments, the plant cell is a plant cell capable of division and/or differentiation, including a plant cell capable of being regenerated into callus or a plant. In embodiments, the plant cell is capable of division and further differentiation, even capable of being regenerated into callus or into a plant. In embodiments, the plant cell is diploid, polyploid, or haploid (or can be induced to become haploid).

[0159] In embodiments, the composition includes a plant cell that includes at least one double-strand break (DSB) in its genome. Alternatively, the composition includes a plant cell in which at least one DSB will be induced in its genome, for example, by providing at least one DSB-inducing agent to the plant cell, e. g., either together with the polynucleotide (such as a double-stranded DNA, a single-stranded DNA, a single-stranded DNA/RNA hybrid, or a double-stranded DNA/RNA hybrid) donor molecule or separately. Thus, the composition optionally further includes at least one DSB-inducing agent. In embodiments, the composition optionally further includes at least one chemical, enzymatic, or physical delivery agent, or a combination thereof; such delivery agents and methods for their use are described in detail in the paragraphs following the heading “Delivery Methods and Delivery Agents”. In embodiments, the DSB-inducing agent is at least one of the group consisting of:
[0160] (a) a nuclease selected from the group consisting of an RNA-guided nuclease, an RNA-guided DNA endonuclease, a type II Cas nuclease, a Cas9, a type V Cas nuclease, a Cpf1, a CasY, a CasX, a C2c1, a C2c3, an engineered nuclease, a codon-optimized nuclease, a zinc-finger nuclease (ZFN), a transcription activator-like effector nuclease (TAL-effector nuclease), an Argonaute, and a meganuclease or engineered meganuclease;
[0161] (b) a polynucleotide encoding one or more nucleases capable of effecting site-specific alteration (such as introduction of a DSB) of a target nucleotide sequence; and
[0162] (c) a guide RNA (gRNA) for an RNA-guided nuclease, or a DNA encoding a gRNA for an RNA-guided nuclease.

[0163] In embodiments, the composition includes (a) a cell; (b) a polynucleotide (such as a double-stranded DNA, a single-stranded DNA, a single-stranded DNA/RNA hybrid, or a double-stranded DNA/RNA hybrid) donor molecule, capable of being integrated (or having its sequence integrated) at a DSB; (c) a Cas9, a Cpf1, a CasY, a CasX, a C2c1, or a C2c3 nuclease; and (d) at least one guide RNA. In an embodiment, the composition includes (a) a cell; (b) a polynucleotide (such as a double-stranded DNA, a single-stranded DNA, a single-stranded DNA/RNA hybrid, or a double-stranded DNA/RNA hybrid) donor molecule, capable of being integrated (or having its sequence integrated) at a DSB; (c) at least one ribonucleoprotein including a CRISPR nuclease and a guide RNA.

[0164] In embodiments of the composition, the polynucleotide donor molecule is double-stranded and blunt-ended, or is double stranded and has an overhang or “sticky end” consisting of unpaired nucleotides (e. g., 1, 2, 3, 4, 5, or 6 unpaired nucleotides) at one terminus or both termini; in other embodiments, the polynucleotide donor molecule is a single-stranded DNA or a single-stranded DNA/RNA hybrid. In an embodiment, the polynucleotide donor molecule is a double-stranded DNA or DNA/RNA hybrid molecule that is blunt-ended or that has an overhang at one terminus or both termini, and that has about 18 to about 300 base-pairs, or about 20 to about 200 base-pairs, or about 30 to about 100 base-pairs, and having at least one phosphorothioate bond between adjacent nucleotides at a 5′ end, 3′ end, or both 5′ and 3′ ends. In embodiments, the polynucleotide donor molecule is a double-stranded DNA, a single-stranded DNA, a single-stranded DNA/RNA hybrid, or a double-stranded DNA/RNA hybrid, and includes single strands of at least 11, at least 18, at least 20, at least 30, at least 40, at least 60, at least 80, at least 100, at least 120, at least 140, at least 160, at least 180, at least 200, at least 240, at least 280, or at least 320 nucleotides. In embodiments, the polynucleotide donor molecule includes chemically modified nucleotides; in embodiments, the naturally occurring phosphodiester backbone of the polynucleotide molecule is partially or completely modified with phosphorothioate, phosphorodithioate, or methylphosphonate internucleotide linkage modifications, or the polynucleotide donor molecule includes modified nucleoside bases or modified sugars, or the polynucleotide donor molecule is labelled with a fluorescent moiety or other detectable label. In an embodiment, the polynucleotide donor molecule is double-stranded and perfectly base-paired through all or most of its length, with the possible exception of any unpaired nucleotides at either terminus or both termini. In another embodiment, the polynucleotide donor molecule is double-stranded and includes one or more non-terminal mismatches or non-terminal unpaired nucleotides within the otherwise double-stranded duplex. Other related embodiments include single- or double-stranded DNA/RNA hybrid donor molecules. Additional description of the polynucleotide donor molecule is found above in the paragraphs following the heading “Polynucleotide Molecules”.

[0165] In embodiments of the composition, the polynucleotide donor molecule includes:
[0166] (a) a nucleotide sequence that is recognizable by a specific binding agent;
[0167] (b) a nucleotide sequence encoding an RNA molecule or an amino acid sequence that is recognizable by a specific binding agent;
[0168] (c) a nucleotide sequence that encodes an RNA molecule or an amino acid sequence that binds specifically to a ligand;
[0169] (d) a nucleotide sequence that is responsive to a specific change in the physical environment; or
[0170] (e) a nucleotide sequence encoding an RNA molecule or an amino acid sequence that is responsive to a specific change in the physical environment;
[0171] (f) a nucleotide sequence encoding at least one stop codon on each strand;
[0172] (g) a nucleotide sequence encoding at least one stop codon within each reading frame on each strand; or
[0173] (h) at least partially self-complementary sequence, such that the polynucleotide molecule encodes a transcript that is capable of forming at least partially double-stranded RNA; or
[0174] (i) a combination of any of (a)-(h).

[0175] Additional description relating to these various embodiments of nucleotide sequences included in the polynucleotide donor molecule is found in the section headed “Methods of changing expression of a sequence of interest in a genome”.

[0176] In another aspect, the invention provides a reaction mixture including: (a) a plant cell having a double-strand break (DSB) at least one locus in its genome; and (b) a polynucleotide (such as a double-stranded DNA, a single-stranded DNA, a single-stranded DNA/RNA hybrid, or a double-stranded DNA/RNA hybrid) donor molecule capable of being integrated or inserted (or having its sequence integrated or inserted) at the DSB (preferably by non-homologous end-joining (NHEJ)), with a length of between about 18 to about 300 base-pairs (or nucleotides, if single-stranded), or between about 30 to about 100 base-pairs (or nucleotides, if single-stranded); wherein sequence encoded by the polynucleotide donor molecule, if integrated at the DSB, forms a heterologous insertion (that is to say, resulting in a concatenated nucleotide sequence that is a combination of the sequence of the polynucleotide molecule and at least some of the genomic sequence adjacent to the site of DSB, wherein the concatenated sequence is heterologous, i. e., would not otherwise or does not normally occur at the site of insertion). In embodiments, the product of the reaction mixture includes a plant cell in which sequence encoded by the polynucleotide donor molecule has been integrated at the site of the DSB.

[0177] In many embodiments of the reaction mixture, the cell is a plant cell, e. g., an isolated plant cell or a plant protoplast, or a plant cell in a plant, plant part, plant tissue, or callus. In various embodiments of the reaction mixture, the plant cell is a plant cell or plant protoplast isolated from a whole plant or plant part or plant tissue (e. g., a plant cell or plant protoplast cultured in liquid medium or on solid medium), or a plant cell located in callus, an intact plant, seed, or seedling, or in a plant part or tissue. In embodiments, the plant cell is a cell of a monocot plant or of a dicot plant. In many embodiments, the plant cell is a plant cell capable of division and/or differentiation, including a plant cell capable of being regenerated into callus or a plant. In embodiments, the plant cell is capable of division and further differentiation, even capable of being regenerated into callus or into a plant. In embodiments, the plant cell is diploid, polyploid, or haploid (or can be induced to become haploid).

[0178] In embodiments, the reaction mixture includes a plant cell that includes at least one double-strand break (DSB) in its genome. Alternatively, the reaction mixture includes a plant cell in which at least one DSB will be induced in its genome, for example, by providing at least one DSB-inducing agent to the plant cell, e. g., either together with a polynucleotide (such as a double-stranded DNA, a single-stranded DNA, a single-stranded DNA/RNA hybrid, or a double-stranded DNA/RNA hybrid) donor molecule capable of being integrated or inserted (or having its sequence integrated or inserted) at the DSB, or separately. Thus, the reaction mixture optionally further includes at least one DSB-inducing agent. In embodiments, the reaction mixture optionally further includes at least one chemical, enzymatic, or physical delivery agent, or a combination thereof; such delivery agents and methods for their use are described in detail in the paragraphs following the heading “Delivery Methods and Delivery Agents”. In embodiments, the DSB-inducing agent is at least one of the group consisting of:
[0179] (a) a nuclease selected from the group consisting of an RNA-guided nuclease, an RNA-guided DNA endonuclease, a type II Cas nuclease, a Cas9, a type V Cas nuclease, a Cpf1, a CasY, a CasX, a C2c1, a C2c3, an engineered nuclease, a codon-optimized nuclease, a zinc-finger nuclease (ZFN), a transcription activator-like effector nuclease (TAL-effector nuclease), an Argonaute, and a meganuclease or engineered meganuclease;
[0180] (b) a polynucleotide encoding one or more nucleases capable of effecting site-specific alteration (such as introduction of a DSB) of a target nucleotide sequence; and
[0181] (c) a guide RNA (gRNA) for an RNA-guided nuclease, or a DNA encoding a gRNA for an RNA-guided nuclease.

[0182] In embodiments, the reaction mixture includes (a) a plant cell; (b) a polynucleotide (such as a double-stranded DNA, a single-stranded DNA, a single-stranded DNA/RNA hybrid, or a double-stranded DNA/RNA hybrid) donor molecule capable of being integrated or inserted (or having its sequence integrated or inserted) at the DSB; (c) a Cas9, a Cpf1, a CasY, a CasX, a C2c1, or a C2c3 nuclease; and (d) at least one guide RNA. In an embodiment, the reaction mixture includes (a) a plant cell or a plant protoplast; (b) a polynucleotide (such as a double-stranded DNA, a single-stranded DNA, a single-stranded DNA/RNA hybrid, or a double-stranded DNA/RNA hybrid) donor molecule capable of being integrated or inserted (or having its sequence integrated or inserted) at the DSB; (c) at least one ribonucleoprotein including a CRISPR nuclease and a guide RNA. In an embodiment, the reaction mixture includes (a) plant cell or a plant protoplast; (b) a polynucleotide (such as a double-stranded DNA, a single-stranded DNA, a single-stranded DNA/RNA hybrid, or a double-stranded DNA/RNA hybrid) donor molecule capable of being integrated or inserted (or having its sequence integrated or inserted) at the DSB; (c) at least one ribonucleoprotein including Cas9 and an sgRNA.

[0183] In embodiments of the reaction mixture, the polynucleotide (such as a double-stranded DNA, a single-stranded DNA, a single-stranded DNA/RNA hybrid, or a double-stranded DNA/RNA hybrid) donor molecule includes:
[0184] (a) a nucleotide sequence that is recognizable by a specific binding agent;
[0185] (b) a nucleotide sequence encoding an RNA molecule or an amino acid sequence that is recognizable by a specific binding agent;
[0186] (c) a nucleotide sequence that encodes an RNA molecule or an amino acid sequence that binds specifically to a ligand;
[0187] (d) a nucleotide sequence that is responsive to a specific change in the physical environment; or
[0188] (e) a nucleotide sequence encoding an RNA molecule or an amino acid sequence that is responsive to a specific change in the physical environment;
[0189] (f) a nucleotide sequence encoding at least one stop codon on each strand;
[0190] (g) a nucleotide sequence encoding at least one stop codon within each reading frame on each strand; or
[0191] (h) at least partially self-complementary sequence, such that the polynucleotide molecule encodes a transcript that is capable of forming at least partially double-stranded RNA; or
[0192] (i) a combination of any of (a)-(h).

[0193] Additional description relating to these various embodiments of nucleotide sequences included in the polynucleotide donor molecule is found in the section headed “Methods of changing expression of a sequence of interest in a genome”.

### Polynucleotides for Disrupting Gene Expression

[0194] In another aspect, the invention provides a polynucleotide (such as a double-stranded DNA, a single-stranded DNA, a single-stranded DNA/RNA hybrid, or a double-stranded DNA/RNA hybrid) molecule for disrupting gene expression, including double-stranded polynucleotides containing at least 18 base-pairs and encoding at least one stop codon in each possible reading frame on each strand and single-stranded polynucleotides containing at least 11 contiguous nucleotides and encoding at least one stop codon in each possible reading frame on the strand. Such a stop-codon-containing polynucleotide, when integrated or inserted at the site of a DSB in a genome, disrupts or hinders translation of an encoded amino acid sequence. In embodiments, the polynucleotide is a double-stranded DNA or double-stranded DNA/RNA hybrid molecule including at least 18 contiguous base-pairs and encoding at least one stop codon in each possible reading frame on either strand; in embodiments, the polynucleotide is a double-stranded DNA or double-stranded DNA/RNA hybrid molecule that is blunt-ended; in other embodiments, the polynucleotide is a double-stranded DNA or double-stranded DNA/RNA hybrid molecule that has one or more overhangs or unpaired nucleotides at one or both termini. In embodiments, the polynucleotide is double-stranded and includes between about 18 to about 300 nucleotides on each strand. In embodiments, the polynucleotide is a single-stranded DNA or a single-stranded DNA/RNA hybrid molecule including at least 11 contiguous nucleotides and encoding at least one stop codon in each possible reading frame on the strand. In embodiments, the polynucleotide is single-stranded and includes between 11 and about 300 contiguous nucleotides in the strand.

[0195] In embodiments, the polynucleotide for disrupting gene expression further includes a nucleotide sequence that provides a useful function when integrated into the site of a DSB in a genome. For example, in various non-limiting embodiments the polynucleotide further includes: sequence that is recognizable by a specific binding agent or that binds to a specific molecule or encodes an RNA molecule or an amino acid sequence that binds to a specific molecule, or sequence that is responsive to a specific change in the physical environment or encodes an RNA molecule or an amino acid sequence that is responsive to a specific change in the physical environment, or heterologous sequence, or sequence that serves to stop transcription at the site of the DSB, or sequence having secondary structure (e. g., double-stranded stems or stem-loops) or than encodes a transcript having secondary structure (e. g., double-stranded RNA that is cleavable by a Dicer-type ribonuclease).

[0196] In an embodiment, the polynucleotide for disrupting gene expression is a double-stranded DNA or a double-stranded DNA/RNA hybrid molecule, wherein each strand of the polynucleotide includes at least 18 and fewer than 200 contiguous base-pairs, wherein the number of base-pairs is not divisible by 3, and wherein each strand encodes at least one stop codon in each possible reading frame in the 5′ to 3′ direction. In an embodiment, the polynucleotide is a double-stranded DNA or a double-stranded DNA/RNA hybrid molecule, wherein the polynucleotide includes at least one phosphorothioate modification.

[0197] Related aspects include larger polynucleotides such as a plasmid, vector, or chromosome including the polynucleotide for disrupting gene expression, as well as polymerase primers for amplification of the polynucleotide for disrupting gene expression.

### Methods of Identifying the Locus of a Double-Stranded Break

[0198] In another aspect, the invention provides a method of identifying the locus of at least one double-stranded break (DSB) in genomic DNA in a cell (such as a plant cell or plant protoplast) including the genomic DNA, the method including: (a) contacting the genomic DNA having a DSB with a polynucleotide (such as a double-stranded DNA, a single-stranded DNA, a single-stranded DNA/RNA hybrid, or a double-stranded DNA/RNA hybrid) molecule, wherein the polynucleotide donor molecule is capable of being integrated (or having its sequence integrated) at the DSB and has a length of at least 2, at least 3, at least 4, at least 5, at least 6, at least 7, at least 8, at least 9, at least 10, or at least 11 base-pairs if double-stranded (or nucleotides if single-stranded), or between about 2 to about 320 base-pairs if double-stranded (or nucleotides if single-stranded), or between about 2 to about 500 base-pairs if double-stranded (or nucleotides if single-stranded), or between about 5 to about 500 base-pairs if double-stranded (or nucleotides if single-stranded), or between about 5 to about 300 base-pairs if double-stranded (or nucleotides if single-stranded), or between about 11 to about 300 base-pairs if double-stranded (or nucleotides if single-stranded), or about 18 to about 300 base-pairs if double-stranded (or nucleotides if single-stranded), or between about 30 to about 100 base-pairs if double-stranded (or nucleotides if single-stranded); wherein sequence encoded by the polynucleotide donor molecule, if integrated at the DSB, forms a heterologous insertion; and (b) using at least part of the sequence encoded by the polynucleotide molecule as a target for PCR primers to allow amplification of DNA in the locus of the double-stranded break. In embodiments, the genomic DNA is that of a nucleus, mitochondrion, or plastid. In embodiments, the DSB locus is identified by amplification using primers specific for DNA sequence encoded by the polynucleotide molecule alone; in other embodiments, the DSB locus is identified by amplification using primers specific for a combination of DNA sequence encoded by the polynucleotide donor molecule and genomic DNA sequence flanking the DSB. Such identification using a heterologously integrated DNA sequence (i. e., that encoded by the polynucleotide molecule) is useful, e. g., to distinguish a cell (such as a plant cell or plant protoplast) containing sequence encoded by the polynucleotide molecule integrated at the DSB from a cell that does not. Identification of an edited genome from a non-edited genome is important for various purposes, e. g., for commercial or regulatory tracking of cells or biological material such as plants or seeds containing an edited genome.

[0199] In a related aspect, the invention provides a method of identifying the locus of double-stranded breaks (DSBs) in genomic DNA in a pool of cells (such as a pool of plant cells or plant protoplasts), wherein the pool of cells includes cells having genomic DNA with sequence encoded by a polynucleotide (such as a double-stranded DNA, a single-stranded DNA, a single-stranded DNA/RNA hybrid, or a double-stranded DNA/RNA hybrid) donor molecule inserted at the locus of the double stranded breaks; wherein the polynucleotide donor molecule is capable of being integrated (or having its sequence integrated) at the DSB and has a length of at least 2, at least 3, at least 4, at least 5, at least 6, at least 7, at least 8, at least 9, at least 10, or at least 11 base-pairs if double-stranded (or nucleotides if single-stranded), or between about 2 to about 320 base-pairs if double-stranded (or nucleotides if single-stranded), or between about 2 to about 500 base-pairs if double-stranded (or nucleotides if single-stranded), or between about 5 to about 500 base-pairs if double-stranded (or nucleotides if single-stranded), or between about 5 to about 300 base-pairs if double-stranded (or nucleotides if single-stranded), or between about 11 to about 300 base-pairs if double-stranded (or nucleotides if single-stranded), or about 18 to about 300 base-pairs if double-stranded (or nucleotides if single-stranded), or between about 30 to about 100 base-pairs if double-stranded (or nucleotides if single-stranded); wherein sequence encoded by the polynucleotide donor molecule, if integrated at the DSB, forms a heterologous insertion; wherein the sequence encoded by the polynucleotide molecule is used as a target for PCR primers to allow amplification of DNA in the region of the double-stranded breaks. In embodiments, the genomic DNA is that of a nucleus, mitochondrion, or plastid. In embodiments, the pool of cells is a population of plant cells or plant protoplasts, wherein the population of plant cells or plant protoplasts include multiple different DSBs (e. g., induced by different guide RNAs) in the genome. In embodiments, each DSB locus is identified by amplification using primers specific for DNA sequence encoded by the polynucleotide molecule alone; in other embodiments, each DSB locus is identified by amplification using primers specific for a combination of DNA sequence encoded by the polynucleotide molecule and genomic DNA sequence flanking the DSB. Such identification using a heterologously integrated DNA sequence (i. e., sequence encoded by the polynucleotide molecule) is useful, e. g., to identify a cell (such as a plant cell or plant protoplast) containing sequence encoded by the polynucleotide molecule integrated at a DSB from a cell that does not.

[0200] In embodiments, the pool of cells is a pool of isolated plant cells or plant protoplasts in liquid or suspension culture, or cultured in or on semi-solid or solid media. In embodiments, the pool of cells is a pool of plant cells or plant protoplasts encapsulated in a polymer or other encapsulating material, enclosed in a vesicle or liposome, or embedded in or attached to a matrix or other solid support (e. g., beads or microbeads, membranes, or solid surfaces). In embodiments, the pool of cells is a pool of plant cells or plant protoplasts encapsulated in a polysaccharide (e. g., pectin, agarose). In embodiments, the pool of cells is a pool of plant cells located in a plant, plant part, or plant tissue, and the cells are optionally isolated from the plant, plant part, or plant tissue in a step following the integration of a polynucleotide at a DSB.

[0201] In embodiments, the polynucleotide donor molecule that is integrated (or has sequence that is integrated) at the DSB is double-stranded and blunt-ended; in other embodiments the polynucleotide donor molecule is double-stranded and has an overhang or “sticky end” consisting of unpaired nucleotides (e. g., 1, 2, 3, 4, 5, or 6 unpaired nucleotides) at one terminus or both termini. In an embodiment, the polynucleotide donor molecule that is integrated (or has sequence that is integrated) at the DSB is a double-stranded DNA or double-stranded DNA/RNA hybrid molecule of about 18 to about 300 base-pairs, or about 20 to about 200 base-pairs, or about 30 to about 100 base-pairs, and having at least one phosphorothioate bond between adjacent nucleotides at a 5′ end, 3′ end, or both 5′ and 3′ ends. In embodiments, the polynucleotide donor molecule includes single strands of at least 11, at least 18, at least 20, at least 30, at least 40, at least 60, at least 80, at least 100, at least 120, at least 140, at least 160, at least 180, at least 200, at least 240, at least 280, or at least 320 nucleotides. In embodiments, the polynucleotide donor molecule has a length of at least 2, at least 3, at least 4, at least 5, at least 6, at least 7, at least 8, at least 9, at least 10, or at least 11 base-pairs if double-stranded (or nucleotides if single-stranded), or between about 2 to about 320 base-pairs if double-stranded (or nucleotides if single-stranded), or between about 2 to about 500 base-pairs if double-stranded (or nucleotides if single-stranded), or between about 5 to about 500 base-pairs if double-stranded (or nucleotides if single-stranded), or between about 5 to about 300 base-pairs if double-stranded (or nucleotides if single-stranded), or between about 11 to about 300 base-pairs if double-stranded (or nucleotides if single-stranded), or about 18 to about 300 base-pairs if double-stranded (or nucleotides if single-stranded), or between about 30 to about 100 base-pairs if double-stranded (or nucleotides if single-stranded). In embodiments, the polynucleotide donor molecule includes chemically modified nucleotides; in embodiments, the naturally occurring phosphodiester backbone of the polynucleotide donor molecule is partially or completely modified with phosphorothioate, phosphorodithioate, or methylphosphonate internucleotide linkage modifications, or the polynucleotide donor molecule includes modified nucleoside bases or modified sugars, or the polynucleotide donor molecule is labelled with a fluorescent moiety or other detectable label. In an embodiment, the polynucleotide donor molecule is double-stranded and is perfectly base-paired through all or most of its length, with the possible exception of any unpaired nucleotides at either terminus or both termini. In another embodiment, the polynucleotide donor molecule is double-stranded and includes one or more non-terminal mismatches or non-terminal unpaired nucleotides within the otherwise double-stranded duplex. In related embodiments, the polynucleotide donor molecule that is integrated at the DSB is a single-stranded DNA or a single-stranded DNA/RNA hybrid. Additional description of the polynucleotide donor molecule is found above in the paragraphs following the heading “Polynucleotide Molecules”.

[0202] In embodiments, the polynucleotide (such as a double-stranded DNA, a single-stranded DNA, a single-stranded DNA/RNA hybrid, or a double-stranded DNA/RNA hybrid) donor molecule that is integrated at the DSB includes a nucleotide sequence that, if integrated (or has sequence that is integrated) at the DSB, forms a heterologous insertion that is not normally found in the genome. In embodiments, sequence encoded by the polynucleotide molecule that is integrated at the DSB includes a nucleotide sequence that does not normally occur in the genome containing the DSB; this can be established by sequencing of the genome, or by hybridization experiments. In certain embodiments, sequence encoded by the polynucleotide molecule, when integrated at the DSB, not only permits identification of the locus of the DSB, but also imparts a functional trait to the cell including the genomic DNA, or to an organism including the cell; in non-limiting examples, sequence encoded by the polynucleotide molecule that is integrated at the DSB includes at least one of the nucleotide sequences selected from the group consisting of:
[0203] (a) DNA encoding at least one stop codon, or at least one stop codon on each strand, or at least one stop codon within each reading frame on each strand;
[0204] (b) DNA encoding heterologous primer sequence (e. g., a sequence of about 18 to about 22 contiguous nucleotides, or of at least 18, at least 20, or at least 22 contiguous nucleotides that can be used to initiate DNA polymerase activity at the site of the DSB);
[0205] (c) DNA encoding a unique identifier sequence (e. g., a sequence that when inserted at the DSB creates a heterologous sequence that can be used to identify the presence of the insertion);
[0206] (d) DNA encoding a transcript-stabilizing sequence;
[0207] (e) DNA encoding a transcript-destabilizing sequence;
[0208] (f) a DNA aptamer or DNA encoding an RNA aptamer or amino acid aptamer; and
[0209] (g) DNA that includes or encodes a sequence recognizable by a specific binding agent.
   Methods of Identifying the Nucleotide Sequence of a Locus in the Genome that is Associated with a Phenotype

[0210] In another aspect, the invention provides a method of identifying the nucleotide sequence of a locus in the genome that is associated with a phenotype, the method including the steps of:
[0211] (a) providing to a population of cells (such as plant cells or plant protoplasts) having the genome:
   [0212] (i) multiple different guide RNAs (gRNAs) to induce multiple different double strand breaks (DSBs) in the genome, wherein each DSB is produced by an RNA-guided nuclease guided to a locus on the genome by one of the gRNAs, and
   [0213] (ii) polynucleotide (such as a double-stranded DNA, a single-stranded DNA, a single-stranded DNA/RNA hybrid, or a double-stranded DNA/RNA hybrid) donor molecules having a defined nucleotide sequence, wherein the polynucleotide molecules are capable of being integrated (or have sequence that is integrated) into the DSBs by non-homologous end-joining (NHEJ);
[0214] whereby when sequence encoded by at least some of the polynucleotide molecules are inserted into at least some of the DSBs, a genetically heterogeneous population of cells is produced;
[0215] (b) selecting from the genetically heterogeneous population of cells a subset of cells that exhibit a phenotype of interest;
[0216] (c) using a pool of PCR primers that bind to sequence encoded by the polynucleotide molecules to amplify from the subset of cells DNA from the locus of a DSB into which sequence encoded by one of the polynucleotide molecules has been inserted; and
[0217] (d) sequencing the amplified DNA to identify the locus associated with the phenotype of interest.

[0218] In embodiments, the cells are plant cells or plant protoplasts or algal cells. In embodiments, the genetically heterogeneous population of cells undergoes one or more doubling cycles; for example, the population of cells is provided with growth conditions that should normally result in cell division, and at least some of the cells undergo one or more doublings. In embodiments, the genetically heterogeneous population of cells is subjected to conditions permitting expression of the phenotype of interest. In embodiments, the cells are provided in a single pool or population (e. g., in a single container); in other embodiments, the cells are provided in an arrayed format (e. g., in microwell plates or in droplets in a microfluidics device or attached individually to particles or beads).

[0219] In embodiments, the RNA-guided nuclease or a polynucleotide that encodes the RNA-guided nuclease is exogenously provided to the population of cells. In embodiments, each gRNA is provided as a polynucleotide composition including: (a) a CRISPR RNA (crRNA) that includes the gRNA, or a polynucleotide that encodes a crRNA, or a polynucleotide that is processed into a crRNA; or (b) a single guide RNA (sgRNA) that includes the gRNA, or a polynucleotide that encodes a sgRNA, or a polynucleotide that is processed into a sgRNA In embodiments, the multiple guide RNAs are provided as ribonucleoproteins (e. g., Cas9 nuclease molecules complexed with different gRNAs to form different RNPs). In embodiments, each gRNA is provided as a ribonucleoprotein (RNP) including the RNA-guided nuclease and an sgRNA. In embodiments, multiple guide RNAs are provided, as well as a single polynucleotide donor molecule having a sequence to be integrated at the resulting DSBs; in other embodiments, multiple guide RNAs are provided, as well as different polynucleotide donor molecules having a sequence to be integrated at the resulting multiple DSBs.

[0220] In another embodiment, a detection method is provided for identifying a plant as having been subjected to genomic modification according to a targeted modification method described herein, where that modification method yields a low frequency of off-target mutations. The detection method comprises a step of identifying the off-target mutations (e.g., an insertion of a non-specific sequence, a deletion, or an indel resulting from the use of the targeting agents, or insertions of part or all of a sequence encoded by one or more polynucleotide donor molecules at one or more coding or non-coding loci in a genome). In a related embodiment, the detection method is used to track of movement of a plant cell or plant or product thereof through a supply chain. The presence of such an identified mutation in a processed product or commodity product is de facto evidence that the product contains or is derived from a plant cell, plant, or seed of this invention. In related embodiments, the presence of the off-target mutations are identified using PCR, a chip-based assay, probes specific for the donor sequences, or any other technique known in the art to be useful for detecting the presence of particular nucleic acid sequences.

### EXAMPLES

### Example 1

[0221] This example illustrates techniques for preparing a plant cell or plant protoplast useful in compositions and methods of the invention, for example, in providing a reaction mixture including a plant cell having a double-strand break (DSB) at least one locus in its genome. More specifically this non-limiting example describes techniques for preparing isolated, viable plant protoplasts from monocot and dicot plants.

[0222] The following mesophyll protoplast preparation protocol (modified from one publicly available at molbio[dot]mgh[dot]harvard.edu/sheenweb/protocols_reg[dot]html) is generally suitable for use with monocot plants such as maize (Zea mays) and rice (Oryza sativa):

[0223] Prepare an enzyme solution containing 0.6 molar mannitol, 10 millimolar MES pH 5.7, 1.5% cellulase R10, and 0.3% macerozyme R10. Heat the enzyme solution at 50-55 degrees Celsius for 10 minutes to inactivate proteases and accelerate enzyme solution and cool it to room temperature before adding 1 millimolar CaCl₂), 5 millimolar β-mercaptoethanol, and 0.1% bovine serum albumin. Pass the enzyme solution through a 0.45 micrometer filter. Prepare a washing solution containing 0.6 molar mannitol, 4 millimolar MES pH 5.7, and 20 millimolar KCl.

[0224] Obtain second leaves of the monocot plant (e. g., maize or rice) and cut out the middle 6-8 centimeters. Stack ten leaf sections and cut into 0.5 millimeter-wide strips without bruising the leaves. Submerge the leaf strips completely in the enzyme solution in a petri dish, cover with aluminum foil, and apply vacuum for 30 minutes to infiltrate the leaf tissue. Transfer the dish to a platform shaker and incubate for an additional 2.5 hours' digestion with gentle shaking (40 rpm). After digestion, carefully transfer the enzyme solution (now containing protoplasts) using a serological pipette through a 35 micrometer nylon mesh into a round-bottom tube; rinse the petri with 5 milliliters of washing solution and filter this through the mesh as well. Centrifuge the protoplast suspension at 1200 rpm, 2 minutes in a swing-bucket centrifuge. Aspirate off as much of the supernatant as possible without touching the pellet; gently wash the pellet once with 20 milliliters washing buffer and remove the supernatant carefully. Gently resuspend the pellet by swirling in a small volume of washing solution, then resuspend in 10-20 milliliters of washing buffer. Place the tube upright on ice for 30 minutes-4 hours (no longer). After resting on ice, remove the supernatant by aspiration and resuspend the pellet with 2-5 milliliters of washing buffer. Measure the concentration of protoplasts using a hemocytometer and adjust the concentration to 2×10\hat{ }5 protoplasts/milliliter with washing buffer.

[0225] The following mesophyll protoplast preparation protocol (modified from one described by Niu and Sheen (2012) Methods Mol. Biol., 876:195-206, doi: 10.1007/978-1-61779-809-2_16) is generally suitable for use with dicot plants such as Arabidopsis thaliana and brassicas such as kale (Brassica oleracea).

[0226] Prepare an enzyme solution containing 0.4 M mannitol, 20 millimolar KCl, 20 millimolar MES pH 5.7, 1.5% cellulase R10, and 0.4% macerozyme R10. Heat the enzyme solution at 50-55 degrees Celsius for 10 minutes to inactivate proteases and accelerate enzyme solution, and then cool it to room temperature before adding 10 millimolar CaCl₂, 5 millimolar β-mercaptoethanol, and 0.1% bovine serum albumin. Pass the enzyme solution through a 0.45 micrometer filter. Prepare a “W5” solution containing 154 millimolar NaCl, 125 millimolar CaCl₂, 5 millimolar KCl, and 2 millimolar MES pH 5.7. Prepare a “MMg solution” solution containing 0.4 molar mannitol, 15 millimolar MgCl₂, and 4 millimolar MES pH 5.7.

[0227] Obtain second or third pair true leaves of the dicot plant (e. g., a brassica such as kale) and cut out the middle section. Stack 4-8 leaf sections and cut into 0.5 millimeter-wide strips without bruising the leaves. Submerge the leaf strips completely in the enzyme solution in a petri dish, cover with aluminum foil, and apply vacuum for 30 minutes to infiltrate the leaf tissue. Transfer the dish to a platform shaker and incubate for an additional 2.5 hours' digestion with gentle shaking (40 rpm). After digestion, carefully transfer the enzyme solution (now containing protoplasts) using a serological pipette through a 35 micrometer nylon mesh into a round-bottom tube; rinse the petri dish with 5 milliliters of washing solution and filter this through the mesh as well. Centrifuge the protoplast suspension at 1200 rpm, 2 minutes in a swing-bucket centrifuge. Aspirate off as much of the supernatant as possible without touching the pellet; gently wash the pellet once with 20 milliliters washing buffer and remove the supernatant carefully. Gently resuspend the pellet by swirling in a small volume of washing solution, then resuspend in 10-20 milliliters of washing buffer. Place the tube upright on ice for 30 minutes-4 hours (no longer). After resting on ice, remove the supernatant by aspiration and resuspend the pellet with 2-5 milliliters of MMg solution. Measure the concentration of protoplasts using a hemocytometer and adjust the concentration to 2×10\hat{ }5 protoplasts/milliliter with MMg solution.

### Example 2

[0228] This example illustrates culture conditions effective in improving viability of plant cells or plant protoplasts. More specifically, this non-limiting example describes media and culture conditions for improving viability of isolated plant protoplasts.

[0229] Table 1 provides the compositions of different liquid basal media suitable for culturing plant cells or plant protoplasts; final pH of all media was adjusted to 5.8 if necessary.

TABLE 1

| | Concentration (mg/L unless otherwise noted) | | | | |
|---|---|---|---|---|---|
| | | | | | YPIM |
| Component | SH | 8p | PIM | P2 | B− |
| Casamino acids | | 250 | | | |
| Coconut water | | 20000 | | | |
| Ascorbic acid | | 2 | | | |
| biotin | | 0.01 | 0.01 | | |
| Cholicalciferol (Vitamin D-3) | | 0.01 | | | |
| choline chloride | | 1 | | | |
| Citric acid | | 40 | | | |
| Cyanocobalamin (Vitamin B-12) | | 0.02 | | | |
| D-calcium pantothenate | | 1 | 1 | | |
| D-Cellobiose | | 250 | | | |
| D-Fructose | | 250 | | | |
| D-Mannose | | 250 | | | |
| D-Ribose | | 250 | | | |
| D-Sorbitol | | 250 | | | |
| D-Xylose | | 250 | | | |
| folic acid | | 0.4 | 0.2 | | |
| Fumaric acid | | 40 | | | |
| L-Malic acid | | 40 | | | |
| L-Rhamnose | | 250 | | | |
| p-Aminobenzoic acid | | 0.02 | | | |
| Retinol (Vitamin A) | | 0.01 | | | |
| Riboflavin | | 0.2 | | | |
| Sodium pyruvate | | 20 | | | |
| 2,4-D | 0.5 | 0.2 | 1 | 5 | 1 |
| 6-benzylaminopurine (BAP) | | | | | 1 |
| Indole-3-butyric acid (IBA) | | | | 2.5 | |
| Kinetin | 0.1 | | | | |
| Naphthaleneacetic acid (NAA) | | 1 | | | |
| parachlorophenoxyacetate | 2 | | | | |
| (pCPA) | | | | | |
| Thidiazuron | | | 0.022 | | |
| Zeatin | | 0.5 | | | |
| AlCl3 | | | 0.03 | | |
| Bromocresol purple | | | 8 | | |
| CaCl₂•2H₂O | 200 | 600 | 440 | 200 | 440 |
| CoCl₂•6H₂O | 0.1 | 0.025 | | 0.1 | |
| CuSO₄•5H₂O | 0.2 | 0.025 | 0.03 | 0.2 | 0.03 |
| D-Glucose | | 68400 | 40000 | | 40000 |
| D-Mannitol | 52000 | 250 | 60000 | 52000 | 60000 |
| FeSO₄•7H₂O | 15 | 27.8 | 15 | 15 | 15 |
| H₃BO₃ | 5 | 3 | 1 | 5 | 1 |
| KCl | | 300 | | | |
| KH₂PO₄ | | 170 | 170 | | 170 |
| KI | 1 | 0.75 | 0.01 | 1 | 0.01 |
| KNO₃ | 2500 | 1900 | 505 | 2500 | 505 |
| MES pH 5.8 (mM) | | | 3.586 | 25 | 25 |
| MgSO₄•7H₂O | 400 | 300 | 370 | 400 | 370 |
| MnSO₄•H₂O | 10 | 10 | 0.1 | 10 | 0.1 |
| Na₂EDTA | 20 | 37.3 | 20 | 20 | 20 |
| Na₂MoO₄•2H₂O | 0.1 | 0.25 | | 0.1 | |
| NH₄H₂PO₄ | 300 | | | 300 | |
| NH₄NO₃ | | 600 | 160 | | 160 |
| NiCl₂•6H₂O | | | 0.03 | | |
| Sucrose | 30000 | 2500 | | 30000 | |
| ZnSO₄•7H₂O | 1 | 2 | 1 | 1 | 1 |
| Tween-80 (microliter/L) | | | 10 | | 10 |
| Inositol | 1000 | 100 | 100 | 1000 | 100 |
| Nicotinamide | | 1 | | | |
| Nicotinic acid | 5 | | 1 | 5 | 1 |
| Pyridoxine•HCl | 0.5 | 1 | 1 | 0.5 | 1 |
| Thiamine•HCl | 5 | 1 | 1 | 5 | 1 |

* Sources for basal media:
SH—Schenk and Hildebrandt, Can. J. Bot. 50: 199 (1971).
8p—Kao and Michayluk, Planta 126: 105 (1975).
P2—SH but with hormones from Potrykus et al., Mol. Gen. Genet. 156: 347 (1977).
PIM—Chupeau et al., The Plant Cell 25: 2444 (2013).

### Example 3

[0230] This example illustrates culture conditions effective in improving viability of plant cells or plant protoplasts. More specifically, this non-limiting example describes methods for encapsulating isolated plant protoplasts.

[0231] When protoplasts are encapsulated in alginate or pectin, they remain intact far longer than they would in an equivalent liquid medium. In order to encapsulate protoplasts, a liquid medium (“calcium base”) is prepared that is in all other respects identical to the final desired recipe with the exception that the calcium (usually CaCl2·2H2O) is increased to 80 millimolar. A second medium (“encapsulation base”) is prepared that has no added calcium but contains 10 g/L of the encapsulation agent, e. g., by making a 20 g/L solution of the encapsulation agent and adjusting its pH with KOH or NaOH until it is about 5.8, making a 2× solution of the final medium (with no calcium), then combining these two solutions in a 1:1 ratio. Encapsulation agents include alginate (e. g., alginic acid from brown algae, catalogue number A0682, Sigma-Aldrich, St. Louis, Mo.) and pectin (e. g., pectin from citrus peel, catalogue number P9136, Sigma-Aldrich, St. Louis, Mo.; various pectins including non-amidated low-methoxyl pectin, catalogue number 1120-50 from Modernist Pantry, Portsmouth, N.H.). The solutions, including the encapsulation base solution, is filter-sterilized through a series of filters, with the final filter being a 0.2-micrometer filter. Protoplasts are pelleted by gentle centrifugation and resuspended in the encapsulation base; the resulting suspension is added dropwise to the calcium base, upon which the protoplasts are immediately encapsulated in solid beads.

### Example 4

[0232] This example illustrates culture conditions effective in improving viability of plant cells or plant protoplasts. More specifically, this non-limiting example describes observations of effects on protoplast viability obtained by adding non-conventionally high levels of divalent cations to culture media.

[0233] Typical plant cell or plant protoplast media contain between about 2 to about 4 millimolar calcium cations and between about 1-1.5 millimolar magnesium cations. In the course of experiments varying and adding components to media, it was discovered that the addition of non-conventionally high levels of divalent cations had a surprisingly beneficial effect on plant cell or plant protoplast viability. Beneficial effects on plant protoplast viability begin to be seen when the culture medium contains about 30 millimolar calcium cations (e. g., as calcium chloride) or about 30 millimolar magnesium cations (e. g., as magnesium chloride). Even higher levels of plant protoplast viability were observed with increasing concentrations of calcium or magnesium cations, i. e., at about 40 millimolar or about 50 millimolar calcium or magnesium cations. The result of several titration experiments indicated that greatest improvement in protoplast viability was seen using media containing between about 50 to about 100 millimolar calcium cations or 50 to about 100 millimolar magnesium cations; no negative effects on protoplast viability or physical appearance was observed at these high cation levels. This was observed in multiple experiments using protoplasts obtained from several plant species including maize (multiple germplasms, e. g., B73, A188, B104, HiIIA, HiIIB, BMS), rice, wheat, soy, kale, and strawberry; improved protoplast viability was observed in both encapsulated protoplasts and non-encapsulated protoplasts. Addition of potassium chloride at the same levels had no effect on protoplast viability. It is possible that inclusion of slightly lower (but still non-conventionally high) levels of divalent cations (e. g., about 10 millimolar, about 15 millimolar, about 20 millimolar, or about 25 millimolar calcium cations or magnesium cations) in media is beneficial for plant cells or plant protoplasts of additional plant species.

### Example 5

[0234] This example illustrates culture conditions effective in improving viability of plant cells or plant protoplasts. More specifically, this non-limiting example describes observations of effects on maize, soybean, and strawberry protoplast viability obtained by adding non-conventionally high levels of divalent cations to culture media.

[0235] Separate suspensions of maize B73, winter wheat, soy, and strawberry protoplasts (2×10\hat{ }5 cells per milliliter) were prepared in YPIM B-liquid medium containing calcium chloride at 0, 50, or 100 millimolar. One-half milliliter aliquots of the suspensions were dispensed into a 24-well microtiter plate.

[0236] Viability at day 8 of culture was judged by visualization under a light microscope. At this point, the viability of the maize protoplasts in the 0, 50, and 100 millimolar calcium conditions was 10%, 30%, and 80%, respectively. There were no large differences observed at this time point for protoplasts of the other species.

[0237] Viability at day 13 was judged by Evans blue staining and visualization under a light microscope. At this point, the viability of the maize protoplasts in the 0, 50, and 100 millimolar calcium conditions was 0%, 0%, and 10%, respectively; viability of the soybean protoplasts in the 0, 50, and 100 millimolar calcium conditions was 0%, 50%, and 50%, respectively; and viability of the maize protoplasts in the 0 and 50 millimolar calcium conditions was 0% and 50%, respectively (viability was not measured for the 100 millimolar condition). These results demonstrate that culture conditions including calcium cations at 50 or 100 millimolar improved viability of both monocot and dicot protoplasts over a culture time of ˜13 days.

### Example 6

[0238] This example illustrates a method of delivery of an effector molecule to a plant cell or plant protoplast to effect a genetic change, in this case introduction of a double-strand break in the genome. More specifically, this non-limiting example describes a method of delivering a guide RNA (gRNA) in the form of a ribonucleoprotein (RNP) to isolated plant protoplasts.

[0239] The following delivery protocol (modified from one publicly available at molbio[dot]mgh[dot]harvard.edu/sheenweb/protocols_reg[dot]html) is generally suitable for use with monocot plants such as maize (Zea mays) and rice (Oryza sativa):

[0240] Prepare a polyethylene glycol (PEG) solution containing 40% PEG 4000, 0.2 molar mannitol, and 0.1 molar CaCl₂). Prepare an incubation solution containing 170 milligram/liter KH₂PO₄, 440 milligram/liter CaCl2.2H₂O, 505 milligram/liter KNOB, 160 milligram/liter NH₄NO₃, 370 milligram/liter MgSO₄·7H₂O, 0.01 milligram/liter KI, 1 milligram/liter H₃BO₃, 0.1 milligram/liter MnSO₄·4H₂O, 1 milligram/liter ZnSO₄·7H₂O, 0.03 milligram/liter CuSO₄·5H₂O, 1 milligram/liter nicotinic acid, 1 milligram/liter thiamine HCl, 1 milligram/liter pyridoxine HCl, 0.2 milligram/liter folic acid, 0.01 milligram/liter biotin, 1 milligram/liter D-Ca-pantothenate, 100 milligram/liter myo-inositol, 40 grams/liter glucose, 60 grams/liter mannitol, 700 milligram/liter MES, 10 microliter/liter Tween 80, 1 milligram/liter 2,4-D, and 1 milligram/liter 6-benzylaminopurine (BAP); adjust pH to 5.6.

[0241] Prepare a crRNA:tracrRNA or guide RNA (gRNA) complex by mixing equal amounts of CRISPR crRNA and tracrRNA (obtainable e. g., as custom-synthesized Alt-RTM CRISPR crRNA and tracrRNA oligonucleotides from Integrated DNA Technologies, Coralville, Iowa): mix 6 microliters of 100 micromolar crRNA and 6 microliters of 100 micromolar tracrRNA, heat at 95 degrees Celsius for 5 minutes, and then cool the crRNA:tracrRNA complex to room temperature. To the cooled gRNA solution, add 10 micrograms Cas9 nuclease (Aldevron, Fargo, N. Dak.) and incubate 5 minutes at room temperature to allow the ribonucleoprotein (RNP) complex to form. Add the RNP solution to 100 microliters of monocot protoplasts (prepared as described in Example 1) in a microfuge tube; add 5 micrograms salmon sperm DNA (VWR Cat. No.: 95037-160) and an equal volume of the PEG solution. Mix gently by tapping. After 5 minutes, dilute with 880 microliters of washing buffer and mix gently by inverting the tube. Centrifuge 1 minute at 1200 rpm and then remove the supernatant. Resuspend the protoplasts in 1 milliliter incubation solution and transfer to a multi-well plate. The efficiency of genome editing is assessed by any suitable method such as heteroduplex cleavage assay or by sequencing, as described elsewhere in this disclosure.

[0242] The following delivery protocol (modified from one described by Niu and Sheen (2012) Methods Mol. Biol., 876:195-206, doi: 10.1007/978-1-61779-809-2_16) is generally suitable for use with dicot plants such as Arabidopsis thaliana and brassicas such as kale (Brassica oleracea):

[0243] Prepare a polyethylene glycol (PEG) solution containing 40% PEG 4000, 0.2 molar mannitol, and 0.1 molar CaCl₂). Prepare an incubation solution containing 170 milligram/liter KH₂PO₄, 440 milligram/liter CaCl₂·2H₂O, 505 milligram/liter KNO₃, 160 milligram/liter NH₄NO₃, 370 milligram/liter MgSO₄·7H₂O, 0.01 milligram/liter KI, 1 milligram/liter H₃BO₃, 0.1 milligram/liter MnSO₄·4H₂O, 1 milligram/liter ZnSO₄·7H₂O, 0.03 milligram/liter CuSO₄·5H₂O, 1 milligram/liter nicotinic acid, 1 milligram/liter thiamine HCl, 1 milligram/liter pyridoxine HCl, 0.2 milligram/liter folic acid, 0.01 milligram/liter biotin, 1 milligram/liter D-Ca-pantothenate, 100 milligram/liter myo-inositol, 40 grams/liter glucose, 60 grams/liter mannitol, 700 milligram/liter MES, 10 microliter/liter Tween 80, 1 milligram/liter 2,4-D, and 1 milligram/liter 6-benzylaminopurine (BAP); adjust pH to 5.6.

[0244] Prepare a crRNA:tracrRNA or guide RNA (gRNA) complex by mixing equal amounts of CRISPR crRNA and tracrRNA (obtainable e. g., as custom-synthesized Alt-RTM CRISPR crRNA and tracrRNA oligonucleotides from Integrated DNA Technologies, Coralville, Iowa): mix 6 microliters of 100 micromolar crRNA and 6 microliters of 100 micromolar tracrRNA, heat at 95 degrees Celsius for 5 minutes, and then cool the crRNA:tracrRNA complex to room temperature. To the cooled gRNA solution, add 10 micrograms Cas9 nuclease (Aldevron, Fargo, N. Dak.) and incubate 5 minutes at room temperature to allow the ribonucleoprotein (RNP) complex to form. Add the RNP solution to 100 microliters of dicot protoplasts (prepared as described in Example 1) in a microfuge tube; add 5 micrograms salmon sperm DNA (VWR Cat. No.: 95037-160) and an equal volume of the PEG solution. Mix gently by tapping. After 5 minutes, dilute with 880 microliters of washing buffer and mix gently by inverting the tube. Centrifuge 1 minute at 1200 rpm and then remove the supernatant. Resuspend the protoplasts in 1 milliliter incubation solution and transfer to a multi-well plate. The efficiency of genome editing is assessed by any suitable method such as heteroduplex cleavage assay or by sequencing, as described elsewhere in this disclosure.

[0245] The above protocols for delivery of gRNAs as RNPs to plant protoplasts are adapted for delivery of guide RNAs alone to monocot or dicot protoplasts that express Cas9 nuclease by transient or stable transformation; in this case, the guide RNA complex is prepared as before and added to the protoplasts, but no Cas9 nuclease and no salmon sperm DNA is added. The remainder of the procedures are identical.

### Example 7

[0246] This example illustrates genome editing in plants and further illustrates a method of delivering gene-editing effector molecules into a plant cell. This example describes introducing at least one double-strand break (DSB) in a genome in a plant cell or plant protoplast, by delivering at least one effector molecules to the plant cell or plant protoplast using at least one physical agent, such as a particulate, microparticulate, or nanoparticulate. More specifically, this non-limiting example illustrates introducing at least one double-strand break (DSB) in a genome in a plant cell or plant protoplast by contacting the plant cell or plant protoplast with a composition including at least one sequence-specific nuclease and at least one physical agent, such as at least one nanocarrier. Embodiments include those wherein the nanocarrier comprises metals (e. g., gold, silver, tungsten, iron, cerium), ceramics (e. g., aluminum oxide, silicon carbide, silicon nitride, tungsten carbide), polymers (e. g., polystyrene, polydiacetylene, and poly(3,4-ethylenedioxythiophene) hydrate), semiconductors (e. g., quantum dots), silicon (e. g., silicon carbide), carbon (e. g., graphite, graphene, graphene oxide, or carbon nanosheets, nanocomplexes, or nanotubes), composites (e. g., polyvinylcarbazole/graphene, polystyrene/graphene, platinum/graphene, palladium/graphene nanocomposites), a polynucleotide, a poly(AT), a polysaccharide (e. g., dextran, chitosan, pectin, hyaluronic acid, and hydroxyethylcellulose), a polypeptide, or a combination of these. In embodiments, such particulates and nanoparticulates are further covalently or non-covalently functionalized, or further include modifiers or cross-linked materials such as polymers (e. g., linear or branched polyethylenimine, poly-lysine), polynucleotides (e. g., DNA or RNA), polysaccharides, lipids, polyglycols (e. g., polyethylene glycol, thiolated polyethylene glycol), polypeptides or proteins, and detectable labels (e. g., a fluorophore, an antigen, an antibody, or a quantum dot). Embodiments include those wherein the nanocarrier is a nanotube, a carbon nanotube, a multi-walled carbon nanotube, or a single-walled carbon nanotube. Specific nanocarrier embodiments contemplated herein include the single-walled carbon nanotubes, cerium oxide nanoparticles (“nanoceria”), and modifications thereof (e. g., with cationic, anionic, or lipid coatings) described in Giraldo et al. (2014) Nature Materials, 13:400-409; the single-walled carbon nanotubes and heteropolymer complexes thereof described in Zhang et al. (2013) Nature Nanotechnol., 8:959-968 (doi:10.1038/NNANO.2013.236); the single-walled carbon nanotubes and heteropolymer complexes thereof described in Wong et al. (2016) Nano Lett., 16:1161-1172; and the various carbon nanotube preparations described in US Patent Application Publication US 2015/0047074 and International Patent Application PCT/US2015/050885 (published as WO 2016/044698 and claiming priority to U.S. Provisional Patent Application 62/052,767), all of which patent applications are incorporated in their entirety by reference herein. See also, for example, the various types of particles and nanoparticles, their preparation, and methods for their use, e. g., in delivering polynucleotides and polypeptides to cells, disclosed in US Patent Application Publications 2010/0311168, 2012/0023619, 2012/0244569, 2013/0145488, 2013/0185823, 2014/0096284, 2015/0040268, 2015/0047074, and 2015/0208663, all of which are incorporated herein by reference in their entirety.

[0247] In these examples, single-walled carbon nanotubes (SWCNT) and modifications thereof are prepared as described in Giraldo et al. (2014) Nature Materials, 13:400-409; Zhang et al. (2013) Nature Nanotechnol., 8:959-968; Wong et al. (2016) Nano Lett., 16:1161-1172; US Patent Application Publication US 2015/0047074; and International Patent Application PCT/US2015/050885 (published as WO 2016/044698). In an initial experiment, a DNA plasmid encoding green fluorescent protein (GFP) as a reporter is non-covalently complexed with a SWCNT preparation and tested on various plant cell preparations including plant cells in suspension culture, plant callus, plant embryos, intact or half seeds, and shoot apical meristem. Delivery to the plant callus, embryos, seeds, and meristem is by treatment with pressure, centrifugation, bombardment, microinjection, infiltration (e. g., with a syringe), or by direct application to the surface of the plant tissue. Efficiency of the SWCNT delivery of GFP across the plant cell wall and the cellular localization of the GFP signal is evaluated by microscopy.

[0248] In another experiment, plasmids encoding Cas9 and at least one guide RNA (gRNA), such as those described in Example 6, are non-covalently complexed with a SWCNT preparation and tested on various plant cell preparations including plant cells in suspension culture, plant callus, plant embryos, intact or half seeds, and shoot apical meristem. Delivery to the plant callus, embryos, seeds, and meristem is by treatment with pressure, centrifugation, bombardment, microinjection, infiltration (e. g., with a syringe), or by direct application to the surface of the plant tissue. The gRNA is designed to target the endogenous plant gene phytoene desaturase (PDS) for silencing, where PDS silencing produces a visible phenotype (bleaching, or low/no chlorophyll).

[0249] In another experiment, RNA encoding Cas9 and at least one guide RNA (gRNA), such as those described in Example 6, are non-covalently complexed with a SWCNT preparation and tested on various plant cell preparations including plant cells in suspension culture, plant callus, plant embryos, intact or half seeds, and shoot apical meristem. Delivery to the plant callus, embryos, seeds, and meristem is by treatment with pressure, centrifugation, bombardment, microinjection, infiltration (e. g., with a syringe), or by direct application to the surface of the plant tissue. The gRNA is designed to target the endogenous plant gene phytoene desaturase (PDS) for silencing, where PDS silencing produces a visible phenotype (bleaching, or low/no chlorophyll).

[0250] In another experiment, a ribonucleoprotein (RNP), prepared by complexation of Cas9 nuclease and at least one guide RNA (gRNA), is non-covalently complexed with a SWCNT preparation and tested on various plant cell preparations including plant cells in suspension culture, plant callus, plant embryos, intact or half seeds, and shoot apical meristem. Delivery to the plant callus, embryos, seeds, and meristem is by treatment with pressure, centrifugation, bombardment, microinjection, infiltration (e. g., with a syringe), or by direct application to the surface of the plant tissue. The gRNA is designed to target the endogenous plant gene phytoene desaturase (PDS) for silencing, where PDS silencing produces a visible phenotype (bleaching, or low/no chlorophyll).

[0251] One of skill in the art would recognize that the above general compositions and procedures can be modified or combined with other reagents and treatments, such as those described in detail in the paragraphs following the heading “Delivery Methods and Delivery Agents”. In addition, the single-walled carbon nanotubes (SWCNT) and modifications thereof prepared as described in Giraldo et al. (2014) Nature Materials, 13:400-409; Zhang et al. (2013) Nature Nanotechnol., 8:959-968; Wong et al. (2016) Nano Lett., 16:1161-1172; US Patent Application Publication US 2015/0047074; and International Patent Application PCT/US2015/050885 (published as WO 2016/044698) can be used to prepare complexes with other polypeptides or polynucleotides or a combination of polypeptides and polynucleotides (e. g., with one or more polypeptides or ribonucleoproteins including at least one functional domain selected from the group consisting of: transposase domains, integrase domains, recombinase domains, resolvase domains, invertase domains, protease domains, DNA methyltransferase domains, DNA hydroxylmethylase domains, DNA demethylase domains, histone acetylase domains, histone deacetylase domains, nuclease domains, repressor domains, activator domains, nuclear-localization signal domains, transcription-regulatory protein (or transcription complex recruiting) domains, cellular uptake activity associated domains, nucleic acid binding domains, antibody presentation domains, histone modifying enzymes, recruiter of histone modifying enzymes, inhibitor of histone modifying enzymes, histone methyltransferases, histone demethylases, histone kinases, histone phosphatases, histone ribosylases, histone deribosylases, histone ubiquitinases, histone deubiquitinases, histone biotinases, and histone tail proteases).

### Example 8

[0252] This example illustrates genome editing in plants and further illustrates a method of delivering gene-editing effector molecules into a plant cell. More specifically, this non-limiting example describes introducing at least one double-strand break (DSB) in a genome in a plant cell or plant protoplast, by contacting the plant cell or plant protoplast with a composition including a sequence-specific nuclease complexed with a gold nanoparticle.

[0253] In embodiments, at least one double-strand break (DSB) is introduced in a genome in a plant cell or plant protoplast, by contacting the plant cell or plant protoplast with a composition that includes a charge-modified sequence-specific nuclease complexed to a charge-modified gold nanoparticle, wherein the complexation is non-covalent, e. g., through ionic or electrostatic interactions. In an embodiment, a sequence-specific nuclease having at least one region bearing a positive charge forms a complex with a negatively-charged gold particle; in another embodiment, a sequence-specific nuclease having at least one region bearing a negative charge forms a complex with a positively-charged gold particle. Any suitable method can be used for modifying the charge of the nuclease or the nanoparticle, for instance, through covalent modification to add functional groups, or non-covalent modification (e. g., by coating a nanoparticle with a cationic, anionic, or lipid coating). In embodiments, the sequence-specific nuclease is a type II Cas nuclease having at least one modification selected from the group consisting of: (a) modification at the N-terminus with at least one negatively charged moiety; (b) modification at the N-terminus with at least one moiety carrying a carboxylate functional group; (c) modification at the N-terminus with at least one glutamate residue, at least one aspartate residue, or a combination of glutamate and aspartate residues; (d) modification at the C-terminus with a localization signal, transit, or targeting peptide; (e) modification at the C-terminus with a nuclear localization signal (NLS), a chloroplast transit peptide (CTP), or a mitochondrial targeting peptide (MTP). In embodiments, the type II Cas nuclease is a Cas9 from Streptococcus pyogenes wherein the Cas9 is modified at the N-terminus with at least one negatively charged moiety and modified at the C-terminus with a nuclear localization signal (NLS), a chloroplast transit peptide (CTP), or a mitochondrial targeting peptide (MTP). In embodiments, the type II Cas nuclease is a Cas9 from Streptococcus pyogenes wherein the Cas9 is modified at the N-terminus with a polyglutamate peptide and modified at the C-terminus with a nuclear localization signal (NLS). In embodiments, the gold nanoparticle has at least one modification selected from the group consisting of: (a) modification with positively charged moieties; (b) modification with at least one moiety carrying a positively charged amine; (c) modification with at least one polyamine; (d) modification with at least one lysine residue, at least one histidine residue, at least one arginine residue, at least one guanidine, or a combination thereof. Specific embodiments include those wherein: (a) the sequence-specific nuclease is a type II Cas nuclease modified at the N-terminus with at least one negatively charged moiety and modified at the C-terminus with a nuclear localization signal (NLS), a chloroplast transit peptide (CTP), or a mitochondrial targeting peptide (MTP); and the gold nanoparticle is modified with at least one positively charged moiety; (b) the type II Cas nuclease is a Cas9 from Streptococcus pyogenes modified at the N-terminus with a polyglutamate peptide and modified at the C-terminus with a nuclear localization signal (NLS); and the gold nanoparticle is modified with at least one at least one lysine residue, at least one histidine residue, at least one arginine residue, at least one guanidine, or a combination thereof; (c) the type II Cas nuclease is a Cas9 from Streptococcus pyogenes modified at the N-terminus with a polyglutamate peptide that includes at least 15 glutamate residues and modified at the C-terminus with a nuclear localization signal (NLS); and wherein the gold nanoparticle is modified with at least one at least one lysine residue, at least one histidine residue, at least one arginine residue, at least one guanidine, or a combination thereof. In a specific embodiment, at least one double-strand break (DSB) is introduced in a genome in a plant cell or plant protoplast, by contacting the plant cell or plant protoplast with a composition including a sequence-specific nuclease complexed with a gold nanoparticle, wherein the sequence-specific nuclease is a Cas9 from Streptococcus pyogenes modified at the N-terminus with a polyglutamate peptide that includes at least 15 glutamate residues and modified at the C-terminus with a nuclear localization signal (NLS); and wherein the gold nanoparticle is in the form of cationic arginine gold nanoparticles (ArgNPs), and wherein when the modified Cas9 and the ArgNPs are mixed, self-assembled nanoassemblies are formed as described in Mout et al. (2017) ACS Nano, doi:10.1021/acsnano.6b07600. Other embodiments contemplated herein include the various nanoparticle-protein complexes (e. g., amine-bearing nanoparticles complexed with carboxylate-bearing proteins) described in International Patent Application PCT/US2016/015711, published as International Patent Application Publication WO2016/123514, which claims priority to U.S. Provisional Patent Applications 62/109,389, 62/132,798, and 62/169,805, all of which patent applications are incorporated in their entirety by reference herein.

[0254] In embodiments, the sequence-specific nuclease is an RNA-guided DNA endonuclease, such as a type II Cas nuclease, and the composition further includes at least one guide RNA (gRNA) for an RNA-guided nuclease, or a DNA encoding a gRNA for an RNA-guided nuclease. The method effects the introduction of at least one double-strand break (DSB) in a genome in a plant cell or plant protoplast; in embodiments, the genome is that of the plant cell or plant protoplast; in embodiments, the genome is that of a nucleus, mitochondrion, plastid, or endosymbiont in the plant cell or plant protoplast. In embodiments, the at least one double-strand break (DSB) is introduced into coding sequence, non-coding sequence, or a combination of coding and non-coding sequence. In embodiments, the plant cell or plant protoplast is a plant cell in an intact plant or seedling or plantlet, a plant tissue, seed, embryo, meristem, germline cells, callus, or a suspension of plant cells or plant protoplasts.

[0255] In embodiments, at least one dsDNA molecule is also provided to the plant cell or plant protoplast, and is integrated at the site of at least one DSB or at the location where genomic sequence is deleted between two DSBs. Embodiments include those wherein: (a) the at least one DSB is two blunt-ended DSBs, resulting in deletion of genomic sequence between the two blunt-ended DSBs, and wherein the dsDNA molecule is blunt-ended and is integrated into the genome between the two blunt-ended DSBs; (b) the at least one DSB is two DSBs, wherein the first DSB is blunt-ended and the second DSB has an overhang, resulting in deletion of genomic sequence between the two DSBs, and wherein the dsDNA molecule is blunt-ended at one terminus and has an overhang on the other terminus, and is integrated into the genome between the two DSBs; (c) the at least one DSB is two DSBs, each having an overhang, resulting in deletion of genomic sequence between the two DSBs, and wherein the dsDNA molecule has an overhang at each terminus and is integrated into the genome between the two DSBs.

[0256] In a non-limiting example, self-assembled green fluorescent protein (GFP)/cationic arginine gold nanoparticles (ArgNPs), nanoassemblies are prepared as described in International Patent Application Publication WO2016/123514. The GFP/ArgNP nanoassemblies are delivered to maize protoplasts and to kale protoplasts prepared as described in Example 1, and to protoplasts prepared from the Black Mexican Sweet (BMS) maize cell line. Efficiency of transfection or delivery is assessed by fluorescence microscopy at time points after transfection (30 minutes, 1 hour, 3 hours, 6 hours, and overnight).

[0257] In a non-limiting example, self-assembled GFP/cationic arginine gold nanoparticles (ArgNPs), nanoassemblies are prepared as described in International Patent Application Publication WO2016/123514. The GFP/ArgNP nanoassemblies are co-incubated with plant cells in suspension culture. Efficiency of transfection or delivery across the plant cell wall is assessed by fluorescence microscopy at time points after transfection (30 minutes, 1 hour, 3 hours, 6 hours, and overnight).

[0258] In a non-limiting example, self-assembled GFP/cationic arginine gold nanoparticles (ArgNPs), nanoassemblies are prepared as described in International Patent Application Publication WO2016/123514. The GFP/ArgNP nanoassemblies are further prepared for Biolistics or particle bombardment and thus delivered to plant cells from suspension cultures transferred to semi-solid or solid media, as well as to soybean embryogenic callus. Efficiency of transfection or delivery across the plant cell wall is assessed by fluorescence microscopy at time points after transfection (30 minutes, 1 hour, 3 hours, 6 hours, and overnight).

[0259] In a non-limiting example, self-assembled GFP/cationic arginine gold nanoparticles (ArgNPs), nanoassemblies are prepared as described in International Patent Application Publication WO2016/123514. The GFP/ArgNP nanoassemblies are delivered by infiltration (e. g., using mild positive pressure or negative pressure) into leaves of Arabidopsis thaliana plants. Efficiency of transfection or delivery across the plant cell wall is assessed by fluorescence microscopy at time points after transfection (30 minutes, 1 hour, 3 hours, 6 hours, and overnight).

[0260] In a non-limiting example, self-assembled Cas9/ArgNP nanoassemblies are prepared as described in Mout et al. (2017) ACS Nano, doi:10.1021/acsnano.6b07600 or alternatively as described in International Patent Application Publication WO2016/123514, by mixing a Cas9 from Streptococcus pyogenes modified at the N-terminus with a polyglutamate peptide that includes at least 15 glutamate residues and modified at the C-terminus with a nuclear localization signal (NLS) with cationic arginine gold nanoparticles (ArgNPs). The Cas9/ArgNP nanoassemblies are delivered to maize protoplasts or to kale protoplasts prepared as described in Example 1, and to protoplasts prepared from the Black Mexican Sweet (BMS) maize cell line. In one variation of the procedure, the Cas9/ArgNP nanoassemblies are co-delivered with at least one guide RNA (such as those described in Examples, 4, 5, 8, 9, 10, 12, and 13) to the protoplasts. In other variations of the procedure, the self-assembled Cas9/ArgNP nanoassemblies are prepared with at least one guide RNA to allow the modified Cas9 to form a ribonucleoprotein (RNP) either prior to or after formation of the nanoassemblies; the self-assembled RNP/ArgNP nanoassemblies are then delivered to the protoplasts. Efficiency of editing is assessed by any suitable method such as a heteroduplex cleavage assay or by sequencing, as described elsewhere in this disclosure.

[0261] In a non-limiting example, self-assembled Cas9/ArgNP nanoassemblies are prepared as described in Mout et al. (2017) ACS Nano, doi:10.1021/acsnano.6b07600 or alternatively as described in International Patent Application Publication WO2016/123514, by mixing a Cas9 from Streptococcus pyogenes modified at the N-terminus with a polyglutamate peptide that includes at least 15 glutamate residues and modified at the C-terminus with a nuclear localization signal (NLS) with cationic arginine gold nanoparticles (ArgNPs). The Cas9/ArgNP nanoassemblies are co-incubated with plant cells in suspension culture. In one variation of the procedure, the Cas9/ArgNP nanoassemblies are co-delivered with at least one guide RNA (such as those described in Examples, 4, 5, 8, 9, 10, 12, and 13) to the plant cells in suspension culture. In other variations of the procedure, the self-assembled Cas9/ArgNP nanoassemblies are prepared with at least one guide RNA to allow the modified Cas9 to form a ribonucleoprotein (RNP) either prior to or after formation of the nanoassemblies; the self-assembled RNP/ArgNP nanoassemblies are then delivered to the plant cells in suspension culture. Efficiency of editing is assessed by any suitable method such as a heteroduplex cleavage assay or by sequencing, as described elsewhere in this disclosure.

[0262] In a non-limiting example, self-assembled Cas9/ArgNP nanoassemblies are prepared as described in Mout et al. (2017) ACS Nano, doi:10.1021/acsnano.6b07600 or alternatively as described in International Patent Application Publication WO2016/123514, by mixing a Cas9 from Streptococcus pyogenes modified at the N-terminus with a polyglutamate peptide that includes at least 15 glutamate residues and modified at the C-terminus with a nuclear localization signal (NLS) with cationic arginine gold nanoparticles (ArgNPs). The Cas9/ArgNP nanoassemblies are further prepared for Biolistics or particle bombardment and thus delivered to plant cells from suspension cultures transferred to semi-solid or solid media, as well as to soybean embryogenic callus. In one variation of the procedure, the Cas9/ArgNP nanoassemblies are co-delivered with at least one guide RNA (such as those described in Examples, 4, 5, 8, 9, 10, 12, and 13) to the plant cells or callus. In other variations of the procedure, the self-assembled Cas9/ArgNP nanoassemblies are prepared with at least one guide RNA to allow the modified Cas9 to form a ribonucleoprotein (RNP) either prior to or after formation of the nanoassemblies; the self-assembled RNP/ArgNP nanoassemblies are then delivered to the plant cells or callus. Efficiency of editing is assessed by any suitable method such as a heteroduplex cleavage assay or by sequencing, as described elsewhere in this disclosure.

[0263] In a non-limiting example, self-assembled Cas9/ArgNP nanoassemblies are prepared as described in Mout et al. (2017) ACS Nano, doi:10.1021/acsnano.6b07600 or alternatively as described in International Patent Application Publication WO2016/123514, by mixing a Cas9 from Streptococcus pyogenes modified at the N-terminus with a polyglutamate peptide that includes at least 15 glutamate residues and modified at the C-terminus with a nuclear localization signal (NLS) with cationic arginine gold nanoparticles (ArgNPs). The Cas9/ArgNP nanoassemblies are delivered by infiltration (e. g., using mild positive pressure or negative pressure) into leaves of Arabidopsis thaliana plants. In one variation of the procedure, the Cas9/ArgNP nanoassemblies are co-delivered with at least one guide RNA (such as those described in Examples, 4, 5, 8, 9, 10, 12, and 13) to the Arabidopsis leaves. In other variations of the procedure, the self-assembled Cas9/ArgNP nanoassemblies are prepared with at least one guide RNA to allow the modified Cas9 to form a ribonucleoprotein (RNP) either prior to or after formation of the nanoassemblies; the self-assembled RNP/ArgNP nanoassemblies are then delivered to the Arabidopsis leaves. Efficiency of editing is assessed by any suitable method such as a heteroduplex cleavage assay or by sequencing, as described elsewhere in this disclosure.

[0264] One of skill in the art would recognize that alternatives to the above compositions and procedures can be used to edit plant cells and intact plants, tissues, seeds, and callus. In embodiments, nanoassemblies are made using other sequence-specific nucleases (e. g., zinc-finger nucleases (ZFNs), transcription activator-like effector nucleases (TAL-effector nucleases or TALENs), Argonaute proteins, or a meganuclease or engineered meganuclease) which can be similarly charge-modified. In embodiments, nanoassemblies are made using other nanoparticles (e. g., nanoparticles made of materials such as carbon, silicon, silicon carbide, gold, tungsten, polymers, ceramics, iron oxide, or cobalt ferrite) which can be similarly charge-modified in order to form non-covalent complexes with the charge-modified sequence-specific nuclease. Similar nanoassemblies including other polypeptides (e. g., phosphatases, hydrolases, oxidoreductases, transferases, lyases, recombinases, polymerases, ligases, and isomerases) or polynucleotides or a combination of polypeptides and polynucleotides are made using similar charge modification methods to enable non-covalent complexation with charge-modified nanoparticles. For example, similar nanoassemblies are made by complexing charge-modified nanoparticles with one or more polypeptides or ribonucleoproteins including at least one functional domain selected from the group consisting of: transposase domains, integrase domains, recombinase domains, resolvase domains, invertase domains, protease domains, DNA methyltransferase domains, DNA hydroxylmethylase domains, DNA demethylase domains, histone acetylase domains, histone deacetylase domains, nuclease domains, repressor domains, activator domains, nuclear-localization signal domains, transcription-regulatory protein (or transcription complex recruiting) domains, cellular uptake activity associated domains, nucleic acid binding domains, antibody presentation domains, histone modifying enzymes, recruiter of histone modifying enzymes, inhibitor of histone modifying enzymes, histone methyltransferases, histone demethylases, histone kinases, histone phosphatases, histone ribosylases, histone deribosylases, histone ubiquitinases, histone deubiquitinases, histone biotinases, and histone tail proteases.

### Example 9

[0265] As described herein, microinjection techniques can be used as an alternative to the methods for delivering targeting agents to protoplasts as described, e.g., in certain Examples above. Microinjection is typically used to target specific cells in isolated embryo sacs or the shoot apical meristem. See, e.g., U.S. Pat. No. 6,300,543, incorporated by reference herein. For example, an injector attached to a Narashige manipulator on a dissecting microscope is adequate because the cells to be microinjected are relatively large (e.g., the egg/synergids/zygote and the central cell). For smaller cells, such as those of the embryo, a compound, inverted microscope with an attached Narashige manipulator is used. Injection pipette diameter and bevel are also important. Use a high quality pipette puller and beveler to prepare needles with adequate strength, flexibility and pore diameter. These will vary depending on the cargo being delivered to cells. The volume of fluid to be microinjected must be exceedingly small and must be carefully controlled. An Eppendorf Transjector yields consistent results (Laurie et al., 1999).

[0266] The genetic cargo can be RNA, DNA, protein or a combination thereof. The cargo can be designed to change one aspect of the target genome or many. The concentration of each cargo component will vary depending on the nature of the manipulation. Typical cargo volumes can vary from 2-20 nanoliters. After microinjection the embryos are maintained on an appropriate media alone (e.g., sterile MS medium with 10% sucrose) or supplemented with a feeder culture. Plantlets are transferred to fresh MS media every two weeks and to larger containers as they grow. Plantlets with a well-developed root system are transferred to soil and maintained in high-humidity for 5 days to acclimate. Plants are gradually exposed to the air and cultivated to reproductive maturity.

[0267] Microinjection of corn embryos: The cobs and tassels are immediately bagged when they appear to prevent pollination. To obtain zygote-containing maize embryo sacs, hand pollination of silks is performed when the silks are 6-10 cm long, the pollinated ears are bagged and tassels removed, and then ears are harvested at 16 hours later. After removing husks and silks, the cobs are cut transversely into 3 cm segments. The segments are surface sterilized in 70% ethanol and then rinsed in sterile distilled, deionized water. Ovaries are then removed and prepared for sectioning. The initial preparation may include mechanical removal of the ovarian wall, but this may not be required.

[0268] Once the ovaries have been removed, they are attached to a Vibratome sectioning block, an instrument designed to produce histological sections without chemical fixation or embedment. The critical attachment step is accomplished using a commercial adhesive such as Locktite cement. Normally 2-3 pairs of ovaries are attached on each sterile sectioning block with the adaxial ovarian surface facing upwards and perpendicular to the longitudinal axis of the rectangular sectioning block (Laurie et al., In Vitro Cell Dev Biol., 35: 320-325, 1999). Ovarian sections (or “nucellar slabs”) are obtained at a thickness of 200 to 400 micrometers. Ideal section thickness is 200 micrometers. The embryo sac will remain viable if it is not cut. The sections are collected with fine forceps and evaluated on a dissecting microscope with basal illumination. Sections with an intact embryo sac are placed on semi-solid Murashige-Skoog (MS) culture medium (Campenot et al., 1992) containing 15% sucrose and 0.1 mg/L benzylaminopurine. Sterile Petriplates containing semi-solid MS medium and nucellar slabs are then placed in an incubator maintained at 26° C. These can be monitored visually by removing plates from the incubator and examining the nucellar slabs with a dissecting microscope in a laminar flow hood.

[0269] Microinjection of soybean embryonic axes: Mature soybean seeds are surface sterilized using chlorine gas. The gas is cleared by air flow in a sterile, laminar flow hood. Seeds are wetted with 70% ethanol for 30 seconds and rinsed with sterile distilled, deionized water then incubated in sterile distilled, deionized water for 30 minutes to 12 hours. The embryonic axes are carefully removed from the cotyledons and placed in MS media with the radicle oriented downwards and the apex exposed to air. The embryonic leaves are carefully removed with fine tweezers to expose the shoot apical meristem.

[0270] Microinjection of rice: Rice tissues that are appropriate for genome editing manipulation include embryogenic callus, exposed shoot apical meristems and 1 DAP embryos. There are many approaches to producing embryogenic callus (for example, Tahir 2010 (doi:10.1007/978-1-61737-988-8_21); Ge et al., 2006 (doi:10.1007/s00299-005-0100-7)). Shoot apical meristem explants can be prepared using a variety of methods in the art (see, e.g., Sticklen and Oraby, 2005 (doi:10.1079/IVP2004616); Baskaran and Dasgupta, 2012 doi:10.1007/s13562-011-0078-x)). This work describes how to prepare and nurture material that is adequate for microinjection.

[0271] To prepare 1 DAP embryos for microinjection, Indica or japonica rice are cultivated under ideal conditions in a greenhouse with supplemental lighting with a 13-hour day, day/night temperatures of 30°/20° C., relative humidity between 60-80%, and adequate fertigation using Hoagland's solution or an equivalent. The 1 DAP zygotes are identified and prepped essentially as described in Zhang et al., 1999, Plant Cell Reports (doi:10.1007/s002990050722). The dissected ovaries with exposed zygotes are placed on the appropriate solid support medium and oriented for easy access using a microinjection needle. Injection and subsequent growth is carried out as described above in this Example.

[0272] Microinjection of tomato: Tomato tissues that are appropriate for genome editing manipulation include embryogenic callus, exposed shoot apical meristems and 1 DAP embryos. There are many approaches to producing embryogenic callus (for example, Toyoda et al., 1988 (doi:10.1007/BF00269921), Tahir 2010 (DOI 10.1007/978-1-61737-988-821), Ge et al., 2006 (doi:10.1007/s00299-005-0100-7), Senapati, 2016 (doi:10.9734/ARRB/2016/22300)). Shoot apical meristem explants can be prepared using a variety of methods in the art (Sticklen and Oraby, 2005 (doi:10.1079/IVP2004616), Baskaran and Dasgupta, 2012 (doi:10.1007/s13562-011-0078-x), Senapati, 2016 (doi:10.9734/ARRB/2016/22300)). This work describes how to prepare and nurture material that is adequate for microinjection.

[0273] To prepare one day after germination seedlings for microinjection, tomato seed are germinated under ideal conditions in a growth chamber with supplemental lighting for a 16-hour day, day/night temperatures of 25/20° C., and relative humidity between 60-80%. The one day after germination seedlings are identified and prepped essentially as described in Vinoth et al., 2013 (doi:10.1007/s12010-012-0006-0). Germinated seeds with 2-3 mm meristems are placed on the appropriate solid support medium and oriented for easy access using a microinjection needle. Injection and subsequent growth is carried out as described above in this Example.

### Example 10

[0274] This example illustrates a method of changing expression of a sequence of interest in a genome, comprising integrating sequence encoded by a polynucleotide (such as a double-stranded DNA, a single-stranded DNA, a single-stranded DNA/RNA hybrid, or a double-stranded DNA/RNA hybrid) donor molecule at the site of at least one double-strand break (DSB) in a genome. More specifically, this non-limiting example illustrates using a ribonucleoprotein (RNP) including a guide RNA (gRNA) and a nuclease to effect a DSB in the genome of a plant, and integration of sequence encoded by a double-stranded DNA (dsDNA) at the site of the DSB, wherein the dsDNA molecule includes a sequence recognizable by a specific binding agent, and wherein contacting the integrated sequence encoded by dsDNA molecule with the specific binding agent results in a change of expression of a sequence of interest. In this particular example, the sequence recognizable by a specific binding agent includes a recombinase recognition site sequence, the specific binding agent is a site-specific recombinase, and the change of expression is upregulation or downregulation or expression of a transcript having an altered sequence (for example, expression of a transcript that has had a region of DNA excised, inverted, or translocated by the recombinase).

[0275] The loxP (“locus of cross-over”) recombinase recognition site and its corresponding recombinase Cre, were originally identified in the P1 bacteriophage. The wild-type loxP 34 base-pair sequence is

(SEQ ID NO: 7)
ATAACTTCGTATAGCATACATTATACGAAGTTAT

and includes two 13 base-pair palindromic sequences flanking an 8 base-pair spacer sequence; the spacer sequence, shown in underlined font, is asymmetric and provides directionality to the loxP site. Other useful loxP variants or recombinase recognition site sequence that function with Cre recombinase are provided in Table 2.

TABLE 2

| | Cre | |
|---|---|---|
| SEQ | recombinase | |
| ID | ecognition | |
| NO: | site | Sequence |
| 7 | LoxP | ATAACTTCGTATAGCATACATTATACGAAGTTAT |
| | (wild- | |
| | type 1) | |
| 8 | LoxP | ATAACTTCGTATAATGTATGCTATACGAAGTTAT |
| | (wild- | |
| | type 2) | |
| 9 | Canonical | ATAACTTCGTATANNNTANNNTATACGAAGTTAT |
| | LoxP | |
| 10 | Lox 511 | ATAACTTCGTATAATGTATACTATACGAAGTTAT |
| 11 | Lox 5171 | ATAACTTCGTATAATGTGTACTATACGAAGTTAT |
| 12 | Lox 2272 | ATAACTTCGTATAAAGTATCCTATACGAAGTTAT |
| 13 | M2 | ATAACTTCGTATAAGAAACCATATACGAAGTTAT |
| 14 | M3 | ATAACTTCGTATATAATACCATATACGAAGTTAT |
| 15 | M7 | ATAACTTCGTATAAGATAGAATATACGAAGTTAT |
| 16 | M11 | ATAACTTCGTATAAGATAGAATATACGAAGTTAT |
| 17 | Lox 71 | TACCGTTCGTATANNNTANNNTATACGAAGTTAT |
| 18 | Lox 66 | ATAACTTCGTATANNNTANNNTATACGAACGGTA |

[0276] Cre recombinase catalyzes the recombination between two compatible (non-heterospecific) loxP sites, which can be located either on the same or on separate DNA molecules. Thus, in embodiments of the invention, polynucleotide (such as double-stranded DNA, single-stranded DNA, single-stranded DNA/RNA hybrid, or double-stranded DNA/RNA hybrid) molecules including compatible recombinase recognition sites sequence are integrated at the site of two or more double-strand breaks (DSBs) in a genome, which can be on the same or on separate DNA molecules (such as chromosomes). Depending on the number of recombinase recognition sites, where these are integrated, and in what orientation, various results are achieved, such as expression of a transcript that has had a region of DNA excised, inverted, or translocated by the recombinase. For example, in the case where one pair of loxP sites (or any pair of compatible recombinase recognition sites) are integrated at the site of DSBs in the genome, if the loxP sites are on the same DNA molecule and integrated in the same orientation, the genomic sequence flanked by the loxP sites is excised, resulting in a deletion of that portion of the genome. If the loxP sites are on the same DNA molecule and integrated in opposite orientation, the genomic sequence flanked by the loxP sites is inverted. If the loxP sites are on separate DNA molecules, translocation of genomic sequence adjacent to the loxP site occurs. Examples of heterologous arrangements or integration patterns of recombinase recognition sites and methods for their use, particularly in plant breeding, are disclosed in U.S. Pat. No. 8,816,153 (see, for example, the Figures and working examples), the entire specification of which is incorporated herein by reference.

[0277] One of skill in the art would recognize that the details provided here are applicable to other recombinases and their corresponding recombinase recognition site sequences, such as, but not limited to, FLP recombinase and frt recombinase recognition site sequences, R recombinase and Rs recombinase recognition site sequences, Dre recombinase and rox recombinase recognition site sequences, and Gin recombinase and gix recombinase recognition site sequences.

### Example 11

[0278] This example illustrates compositions and reaction mixtures useful for delivering at least one effector molecule for inducing a genetic alteration in a plant cell or plant protoplast.

[0279] Sequences of plasmids for delivery of Cas9 (Csn1) endonuclease from the Streptococcus pyogenes Type II CRISPR/Cas system and for delivery of a single guide RNA (sgRNA) are provided in Tables 3 and 4. In this non-limiting example, the sgRNA targets the endogenous phytoene desaturase (PDS) in soybean, Glycine max; one of skill would understand that other sgRNA sequences for alternative target genes could be substituted in the plasmid.

TABLE 3
sgRNA vector (SEQ ID NO: 677), 3079 base pairs DNA

| Nucleotide | | |
|---|---|---|
| position in | | |
| SEQ ID | | |
| NO: 677 | Description | Comment |
| 1-3079 | Intact plasmid | SEQ ID NO: 677 |
| 379-395 | M13 forward primer for sequencing | |
| 412-717 | Glycine max U6 promoter | |
| 717-736 | Glycine max phytoene desaturase targeting | SEQ ID NO: 678 |
| | sequence (gRNA) | |
| 737-812 | guide RNA scaffold sequence for S. pyogenes | SEQ ID NO: 679 |
| | CRISPR/Cas9 system | |
| 856-874 | M13 reverse primer for sequencing | complement |
| 882-898 | lac repressor encoded by lacI | |
| 906-936 | lac promoter for the E. coli lac operon | complement |
| 951-972 | E. coli catabolite activator protein (CAP) binding | |
| | site | |
| 1260-1848 | high-copy-number ColE1/pMB1/pBR322/pUC | complement |
| | origin of replication (left direction) | |
| 2019-2879 | CDS for bla, beta-lactamase, AmpR | complement; |
| | | ampicillin selection |
| 2880-2984 | bla promoter | complement |

[0280] The sgRNA vector having the sequence of SEQ ID NO:677 contains nucleotides at positions 717-812 encoding a single guide RNA having the sequence of SEQ ID NO:680 (GAAGCAAGAGACGTTCTAGGGTTTTAGAGCTAGAAATAGCAAGTTAAAATAAGGCTAGTCC GTTATCAACTTGAAAAAGTGGCACCGAGTCGGTGC), which includes both a targeting sequence (gRNA) (GAAGCAAGAGACGTTCTAGG, SEQ ID NO:678) and a guide RNA scaffold (GTTTTAGAGCTAGAAATAGCAAGTTAAAATAAGGCTAGTCCGTTATCAACTTGAAAAAGTG GCACCGAGTCGGTGC, SEQ ID NO:679); transcription of the sgRNA is driven by a Glycine max U6 promoter at nucleotide positions 412-717. The sgRNA vector also includes lac operon and ampicillin resistance sequences for convenient selection of the plasmid in bacterial cultures.

TABLE 4
endonuclease vector (SEQ ID NO: 681), 8569 base pairs DNA

| Nucleotide | | |
|---|---|---|
| position in | | |
| SEQ ID | | |
| NO: 681 | Description | Comment |
| 1-8569 | Intact plasmid | SEQ ID NO: 681 |
| 379-395 | M13 forward primer for sequencing | |
| 419-1908 | Glycine max UbiL promoter | |
| 1917-6020 | Cas9 (Csn1) endonuclease from the Streptococcus | SEQ ID NO: 682 (encodes |
| | pyogenes type II CRISPR/Cas system | protein with sequence |
| | | of SEQ ID NO: 683) |
| 6033-6053 | nuclear localization signal of SV40 large T | SEQ ID NO: 684 (encodes |
| | antigen | peptide with sequence |
| | | of SEQ ID NO: 685 |
| 6065-6317 | nopaline synthase (NOS) terminator and poly(A) | |
| | signal | |
| 6348-6364 | M13 reverse primer for sequencing | complement |
| 6372-6388 | lac repressor encoded by lacI | |
| 6396-6426 | lac promoter for the E. coli lac operon | complement |
| 6441-6462 | E. coli catabolite activator protein (CAP) binding | |
| | site | |
| 6750-7338 | high-copy-number ColE1/pMB1/pBR322/pUC | complement |
| | origin of replication (left direction) | |
| 7509-8369 | CDS for bla, beta-lactamase, AmpR | complement; |
| | | ampicillin selection |
| 8370-8474 | bla promoter | complement |

[0281] The endonuclease vector having the sequence of SEQ ID NO:681 contains nucleotides at positions 1917-6020 having the sequence of SEQ ID NO:682 and encoding the Cas9 nuclease from Streptococcus pyogenes that has the amino acid sequence of SEQ ID NO:683, and nucleotides at positions 6033-6053 having the sequence of CCTAAGAAGAAGAGGAAGGTT (SEQ ID NO:684) and encoding the nuclear localization signal (NLS) of simian virus 40 (SV40) large T antigen that has the amino acid sequence of PKKKRKV (SEQ ID NO:685). Transcription of the Cas9 nuclease and adjacent SV40 nuclear localization signal is driven by a Glycine max UbiL promoter at nucleotide positions 419-1908; the resulting transcript including nucleotides at positions 1917-6053 having the sequence of SEQ ID NO:686 encodes a fusion protein having the sequence of SEQ ID NO:687 wherein the Cas9 nuclease is linked through a 4-residue peptide linker to the SV40 nuclear localization signal. The endonuclease vector also includes lac operon and ampicillin resistance sequences for convenient selection of the plasmid in bacterial cultures.

[0282] Similar vectors for expression of nucleases and sgRNAs are also described, e. g., in Fauser et al. (2014) Plant J., 79:348-359; and described at www[dot]addgene[dot[org/crispr. It will be apparent to one skilled in the art that analogous plasmids are easily designed to encode other guide polynucleotide or nuclease sequences, optionally including different elements (e. g., different promoters, terminators, selectable or detectable markers, a cell-penetrating peptide, a nuclear localization signal, a chloroplast transit peptide, or a mitochondrial targeting peptide, etc.), and used in a similar manner. Embodiments of nuclease fusion proteins include fusions (with or without an optional peptide linking sequence) between the Cas9 nuclease from Streptococcus pyogenes that has the amino acid sequence of SEQ ID NO:683 and at least one of the following peptide sequences: (a) GRKKRRQRRRPPQ (“HIV-1 Tat (48-60)”, SEQ ID NO:688), (b) GRKKRRQRRRPQ (“TAT”, SEQ ID NO:689), (c) YGRKKRRQRRR (“TAT (47-57)”, SEQ ID NO:690), (d) KLALKLALKALKAALKLA (“MAP (KLAL)”, SEQ ID NO:691), (e) RQIRIWFQNRRMRWRR (“Penetratin-Arg”, SEQ ID NO:692), (f) CSIPPEVKFNKPFVYLI (“antitrypsin (358-374)”, SEQ ID NO:693), (g) RRRQRRKKRGGDIMGEWGNEIFGAIAGFLG (“TAT-HA2 Fusion Peptide”, SEQ ID NO:694), (h) FVQWFSKFLGRIL-NH2 (“Temporin L, amide”, SEQ ID NO:695), (i) LLIILRRRIRKQAHAHSK (“pVEC (Cadherin-5)”, SEQ ID NO:696), (j) LGTYTQDFNKFHTFPQTAIGVGAP (“Calcitonin”, SEQ ID NO:697), (k) GAAEAAARVYDLGLRRLRQRRRLRRERVRA (“Neurturin”, SEQ ID NO:698), (1) MGLGLHLLVLAAALQGAWSQPKKKRKV (“Human P1”, SEQ ID NO:699), (m) RQIKIWFQNRRMKWKKGG (“Penetratin”, SEQ ID NO:700), poly-arginine peptides including (n) RRRRRRRR (“octo-arginine”, SEQ ID NO:701) and (o) RRRRRRRRR (“nono-arginine”, SEQ ID NO:702), and (p) KKLFKKILKYLKKLFKKILKYLKKKKKKKK (“(BP100x2)-K8”, SEQ ID NO:703); these nuclease fusion proteins are specifically claimed herein, as are analogous fusion proteins including a nuclease selected from Cpf1, CasY, CasX, C2c1, or C2c3 and at least one of the peptides having a sequence selected from SEQ ID NOs:688-703. In other embodiments, such vectors are used to produce a guide RNA (such as one or more crRNAs or sgRNAs) or the nuclease protein; guide RNAs and nucleases can be combined to produce a specific ribonucleoprotein complex for delivery to the plant cell; in an example, a ribonucleoprotein including the sgRNA having the sequence of SEQ ID NO:680 and the Cas9-NLS fusion protein having the sequence of SEQ ID NO:687 is produced for delivery to the plant cell. Related aspects of the invention thus encompass ribonucleoprotein compositions containing the ribonucleoprotein including the sgRNA having the sequence of SEQ ID NO:680 and a Cas9 fusion protein such as the Cas9-NLS fusion protein having the sequence of SEQ ID NO:687, and polynucleotide compositions containing one or more polynucleotides including the sequences of SEQ ID NOs:680 or 686. The above sgRNA and nuclease vectors are delivered to plant cells or plant protoplasts using compositions and methods described in the specification.

[0283] A plasmid (“pCas9TPC-GmPDS”) having the nucleotide sequence of SEQ ID NO:704 was designed for simultaneous delivery of Cas9 (Csn1) endonuclease from the Streptococcus pyogenes Type II CRISPR/Cas system and a single guide RNA (sgRNA) targeting the endogenous phytoene desaturase (PDS) in soybean, Glycine max. In this non-limiting example, the sgRNA targets the endogenous phytoene desaturase (PDS) in soybean, Glycine max; one of skill would understand that other sgRNA sequences for alternative target genes could be substituted in the plasmid. The sequences of this plasmid and specific elements contained therein are described in Table 5 below.

TABLE 5
pCas9TPC-GmPDS vector (SEQ ID NO: 704), 14548 base pairs DNA

| Nucleotide | | |
|---|---|---|
| position in | | |
| SEQ ID | | |
| NO: 704 | Description | Comment |
| 1-14548 | Intact plasmid | SEQ ID NO: 704 |
| 1187-1816 | pVS1 StaA | stability protein from the |
| | | Pseudomonas plasmid pVS1 |
| 2250-3317 | pVS1 RepA | replication protein from the |
| | | Pseudomonas plasmid pVS1 |
| 3383-3577 | pVS1 oriV | origin of replication for the |
| | | Pseudomonas plasmid pVS1 |
| 3921-4061 | basis of mobility region from pBR322 | |
| 4247-4835 | high-copy-number ColE1/pMB1/pBR322/pUC | complement |
| | origin of replication (left direction) | |
| 5079-5870 | aminoglycoside adenylyltransferase (aadA), | complement |
| | confers resistance to spectinomycin and | |
| | streptomycin | |
| 6398-6422 | left border repeat from nopaline C58 T-DNA | |
| 6599-6620 | E. coli catabolite activator protein (CAP) binding | |
| | site | |
| 6635-6665 | lac promoter for the E. coli lac operon | |
| 6673-6689 | lac repressor encoded by lacI | |
| 6697-6713 | M13 reverse primer for sequencing | |
| 6728-7699 | PcUbi4-2 promoter | |
| 7714-11817 | Cas9 (Csn1) endonuclease from the Streptococcus | SEQ ID NO: 682 (encodes |
| | pyogenes type II CRISPR/Cas system | protein with sequence |
| | | of SEQ ID NO: 683) |
| 11830-11850 | nuclear localization signal of SV40 large T | SEQ ID NO: 684 (encodes |
| | antigen | peptide with sequence |
| | | of SEQ ID NO: 685 |
| 11868-12336 | Pea3A terminator | |
| 12349-12736 | AtU6-26 promoter | |
| 12737-12756 | Glycine max phytoene desaturase targeting | SEQ ID NO: 678 |
| | sequence (gRNA) | |
| 12757-12832 | guide RNA scaffold sequence for S. pyogenes | SEQ ID NO: 679 |
| | CRISPR/Cas9 system | |
| 12844-12868 | attB2; recombination site for Gateway ® BP | complement |
| | reaction | |
| 13549-14100 | Streptomyces hygroscopicus bar or pat, encodes | |
| | phosphinothricin acetyltransferase, confers | |
| | resistance to bialophos or phosphinothricin | |
| 14199-14215 | M13 forward primer, for sequencing | complement |
| 14411-14435 | right border repeat from nopaline C58 T-DNA | |

[0284] The pCas9TPC-GmPDS vector having the sequence of SEQ ID NO:704 contains nucleotides at positions 12737-12832 encoding a single guide RNA having the sequence of SEQ ID NO:680, which includes both a targeting sequence (gRNA) (SEQ ID NO:678) and a guide RNA scaffold (SEQ ID NO:679); transcription of the single guide RNA is driven by a AtU6-26 promoter at nucleotide positions 12349-12736. This vector further contains nucleotides at positions 7714-11817 having the sequence of SEQ ID NO:682 and encoding the Cas9 nuclease from Streptococcus pyogenes that has the amino acid sequence of SEQ ID NO:683, and nucleotides at positions 11830-11850 having the sequence of SEQ ID NO:684 and encoding the nuclear localization signal (NLS) of simian virus 40 (SV40) large T antigen that has the amino acid sequence of SEQ ID NO:685. Transcription of the Cas9 nuclease and adjacent SV40 nuclear localization signal is driven by a PcUbi4-2 promoter at nucleotide positions 6728-7699; the resulting transcript including nucleotides at positions 7714-11850 having the sequence of SEQ ID NO:686 encodes a fusion protein having the sequence of SEQ ID NO:687 wherein the Cas9 nuclease is linked through a 4-residue peptide linker to the SV40 nuclear localization signal. The pCas9TPC-GmPDS vector also includes lac operon, aminoglycoside adenylyltransferase, and phosphinothricin acetyltransferase sequences for convenient selection of the plasmid in bacterial or plant cultures.

[0285] A plasmid (“pCas9TPC-NbPDS”) having the nucleotide sequence of SEQ ID NO:705 was designed for simultaneous delivery of Cas9 (Csn1) endonuclease from the Streptococcus pyogenes Type II CRISPR/Cas system and a single guide RNA (sgRNA) targeting the endogenous phytoene desaturase (PDS) in Nicotiana benthamiana; see Nekrasov et al. (2013) Nature Biotechnol., 31:691-693. In this non-limiting example, the sgRNA targets the endogenous phytoene desaturase (PDS) in Nicotiana benthamiana; one of skill would understand that other sgRNA sequences for alternative target genes could be substituted in the plasmid. The sequences of this plasmid and specific elements contained therein are described in Table 6 below.

TABLE 6
pCas9TPC-NbPDS vector (SEQ ID NO: 705), 14548 base pairs DNA

| Nucleotide | | |
|---|---|---|
| position in | | |
| SEQ ID | | |
| NO: 705 | Description | Comment |
| 1-14548 | Intact plasmid | SEQ ID NO: 705 |
| 1187-1816 | pVS1 StaA | stability protein from the |
| | | Pseudomonas plasmid pVS1 |
| 2250-3317 | pVS1 RepA | replication protein from the |
| | | Pseudomonas plasmid pVS1 |
| 3383-3577 | pVS1 oriV | origin of replication for the |
| | | Pseudomonas plasmid pVS1 |
| 3921-4061 | basis of mobility region from pBR322 | |
| 4247-4835 | high-copy-number ColE1/pMB1/pBR322/pUC | Complement |
| | origin of replication (left direction) | |
| 5079-5870 | aminoglycoside adenylyltransferase (aadA), | Complement |
| | confers resistance to spectinomycin and | |
| | streptomycin | |
| 6398-6422 | left border repeat from nopaline C58 T-DNA | |
| 6599-6620 | E. coli catabolite activator protein (CAP) binding | |
| | site | |
| 6635-6665 | lac promoter for the E. coli lac operon | |
| 6673-6689 | lac repressor encoded by lacI | |
| 6697-6713 | M13 reverse primer for sequencing | |
| 6728-7699 | PcUbi4-2 promoter | |
| 7714-11817 | Cas9 (Csn1) endonuclease from the Streptococcus | SEQ ID NO: 682 (encodes |
| | pyogenes type II CRISPR/Cas system | protein with sequence |
| | | of SEQ ID NO: 683) |
| 11830-11850 | nuclear localization signal of SV40 large T | SEQ ID NO: 684 (encodes |
| | antigen | peptide with sequence |
| | | of SEQ ID NO: 685 |
| 11868-12336 | Pea3A terminator | |
| 12349-12736 | AtU6-26 promoter | |
| 12737-12756 | Nicotiana benthamiana phytoene desaturase | SEQ ID NO: 706 |
| | targeting sequence | |
| 12757-12832 | guide RNA scaffold sequence for S. pyogenes | SEQ ID NO: 679 |
| | CRISPR/Cas9 system | |
| 12844-12868 | attB2; recombination site for Gateway ® BP | Complement |
| | reaction | |
| 13549-14100 | Streptomyces hygroscopicus bar or pat, encodes | |
| | phosphinothricin acetyltransferase, confers | |
| | resistance to bialophos or phosphinothricin | |
| 14199-14215 | M13 forward primer, for sequencing | Complement |
| 14411-14435 | right border repeat from nopaline C58 T-DNA | |

[0286] The pCas9TPC-NbPDS vector having the sequence of SEQ ID NO:705 contains nucleotides at positions 12737-12832 encoding a single guide RNA having the sequence of SEQ ID NO:707 (GCCGTTAATTTGAGAGTCCAGTTTTAGAGCTAGAAATAGCAAGTTAAAATAAGGCTAGTCC GTTATCAACTTGAAAAAGTGGCACCGAGTCGGTGC), which includes both a targeting sequence (gRNA) (GCCGTTAATTTGAGAGTCCA, SEQ ID NO:706) and a guide RNA scaffold (SEQ ID NO:679); transcription of the single guide RNA is driven by a AtU6-26 promoter at nucleotide positions 12349-12736. This vector further contains nucleotides at positions 7714-11817 having the sequence of SEQ ID NO:682 and encoding the Cas9 nuclease from Streptococcus pyogenes that has the amino acid sequence of SEQ ID NO:683, and nucleotides at positions 11830-11850 having the sequence of SEQ ID NO:684 and encoding the nuclear localization signal (NLS) of simian virus 40 (SV40) large T antigen that has the amino acid sequence of SEQ ID NO:685. Transcription of the Cas9 nuclease and adjacent SV40 nuclear localization signal is driven by a PcUbi4-2 promoter at nucleotide positions 6728-7699; the resulting transcript including nucleotides at positions 7714-11850 having the sequence of SEQ ID NO:686 encodes a fusion protein having the sequence of SEQ ID NO:687 wherein the Cas9 nuclease is linked through a 4-residue peptide linker to the SV40 nuclear localization signal. The pCas9TPC-NbPDS vector also includes lac operon, aminoglycoside adenylyltransferase, and phosphinothricin acetyltransferase sequences for convenient selection of the plasmid in bacterial or plant cultures.

### Example 12

[0287] This example describes the preparation of reagents to create novel diversity in a region of the genome where low recombination frequency has prevented plant breeders from being able to select for novel alleles.

[0288] Soybean protoplasts are prepared as described in Examples 1-5. Preparation of reagents is completed essentially as described in Examples 6-9.

[0289] The gene selected is SHAT1-5 (see www.uniprot.org/uniprot/W8E7P1), a major domestication gene in soybean responsible for the reduced pod shattering that is required for harvestability (doi:10.1038/ncomms4352). The selective sweep and apparent low rate of recombination at this locus has resulted in no detectable genetic diversity across a 116 kb region of Glycine max chromosome 16 including 5 genes. As such, breeders have not been able to select different alleles of SHAT1-5 or diverse alleles for the surrounding 5 genes. A partial genomic sequence of SHAT1-5 is provided as CACGTGGCCCCACACACATTTTTTTTCCCTCAACAGTTAAACTCTCTTCCTCCATCTTTCTTGG TAGGTGGCACTTCTCGGAGCATAGTAAAACTAACCCCA [symbol] TCATTTTC ATTATATTATAAACCTATATATATACCCAATTGGTTATTGGTGTCTGGTGTCCCTTCAACCTT TAAAACAAACAAATCCattttctttttcttttttttttcattttattttttccattattttatCAACACAATTAATTCCA [symbol] [symbol] CTGTCCCACAGCACATATATATAGTCTCGCTTTACATACTCATTCCATGG CCAGTACACACACCA [symbol] TCAATTCCTATCCTCTTCCTTGTAGTGTA CCCATTTTGAATGTGTtctctctctctctctctttTTAGGTCCCTGGTGAATATCTAGAACCACTCTCT (SEQ ID NO:708). A SHAT1-repressor nucleotide sequence encoded by a polynucleotide (such as a double-stranded DNA, a single-stranded DNA, a single-stranded DNA/RNA hybrid, or a double-stranded DNA/RNA hybrid) donor molecule having the sequence ATTAAAAAAATAAATAAGATATTATTAAAAAAATAAATAAGATATTATTAAAAAAATAAAT AAGATATT ATTAAAAAAATAAATAAGATATT (SEQ ID NO:709) is designed for insertion at a double-strand break effected between nucleotides at positions 103/104, 274/275, or 359/360 of SEQ ID NO:708 (insertion is in between the underlined nucleotides) in order to reduce the expression of SHAT1-5 gene. The nucleotides targeted by each of the three different SHAT1-5 crRNAs are shown in bold italic in SEQ ID NO:708; the crRNA sequences are provided as AAAUGAAAAAGAAAAAUGUGGUUUUAGAGCUAUGCU (SEQ ID NO:710), AAAGGACCAAAGGAUACACAGUUUUAGAGCUAUGCU (SEQ ID NO:711), and AAGAAAGAUAUAAUGAGGUGGUUUUAGAGCUAUGCU (SEQ ID NO:712). All crRNA and tracrRNA are purchased from Integrated DNA Technologies, Coralville, Iowa Ribonucleoprotein (RNP) complexes are prepared using gRNA (crRNA:tracrRNA) and Cas9 nuclease (Aldevron, Fargo, N. Dak.).

### Example 13

[0290] The determinate habit of soybean (Glycine max) is controlled by a recessive allele at the determinate stem (Dt1, GeneID: 100776154) locus. Dt1 encodes the GmTFL1b protein, an ortholog of Arabidopsis TERMINAL FLOWER 1 (TFL1). The TFL1 gene in Arabidopsis maintains the indeterminate growth of the SAM by inhibiting the expression of the floral meristem identity genes LFY and AP1. Down-regulation of Da suppressed the indeterminate growth at shoot apical meristems in indeterminate plants (doi:10.1104/pp. 109.150607). Knockout Dt1 can convert indeterminate soybean varieties to determinate soybeans.

[0291] Dt1 gene exon 1 to exon 2 (473 bp, 83-555 bp downstream of TSS, exons are in uppercase) is:

(SEQ ID NO: 713)
ATGGCAAGAATGCCTTTAGAGCCTCTAATAGTGGGGAGAGTCATAGGAGA
AGTTCTTGATTCTTTTACCACAAGCACAAAAATGATTGTGAGTTACAACA
AGAATCAAGTCTACAATGGCCATGAACTCTTCCCTTCCACTGTCAACACC
AAGCCCAAGGTTGAGATTGAGGGTGGTGATATGAGGTCCTTCTTTACACT
Ggtactatatatatatcttttatctcctctcttattccttttctctttaa
agaacaaagttttttgggaaaaaaaagagaggaaaaacttgagctgttgc
cagtgtgtatctttgttgtttcctgtaattcagctcacacagtaagtctc
ttttggagttttctttaccaatactgaatcattaagctaatgtctcgctt
ttttggtgcagATCATGACTGACCCTGATGTTCCTGGCCCTAGTGACCCT
TATCTGAGAGAGCACTTGCACTG.

[0292] Two RNP with cutting sites at 225 bp and 511 bp downstream of TSS are delivered to cells together to knockout DO gene. The crRNA sequences are

(SEQ ID NO: 714)
CUUGGGCUUGGUGUUGACAGGUUUUAGAGCUAUGCU
and
(SEQ ID NO: 715)
CACUAGGGCCAGGAACAUCAGUUUUAGAGCUAUGCU.

[0293] As an exemplary assay for readout, QPCR can be used to check the transcript level of Da and CRISPR amplicon sequencing can be used to confirm the loss-of-function editing. Phenotypic readout of edited plants can be determined with determinate phenotype.

### Example 14

[0294] Soybean is a facultative short-day plant. Rich genetic variability in photoperiod responses enables the crop to adapt to a wide range of latitudes. Ten major genes have been identified so far to control time to flowering and maturity: E1, E2, E3, E4, E5, E6, E7, E8, E9 and J. E9 was identified through the molecular dissection of a QTL for early flowering introduced from a wild soybean accession. E9 encodes FT2a (GeneID: 100814951), an ortholog of Arabidopsis FLOWERING LOCUS T. Its recessive allele with lower transcript expression level delays flowering (doi:10.1186/s12870-016-0704-9). Overexpression of FT2a showed early flowering and increased pods per node (US20160304891 A1). Insertion of E2F binding site in FT2a promoter could increase the expression of FT2a in the meristem.

[0295] FT2a promoter (500 bp upstream of TSS) is:

(SEQ ID NO: 716)
AATTAATTGACAAAAAATGGTTTCTGTTTCATATAGAAACTATGTTTTT
GTTGTGTAGTCATACATTACGGAATCTAGTTTCCATTAAATAAGTAACG
TGAAAAAAAATAAAAGGTGAAATATATATTGTTGGAAAAGAAGCTATGA
GGTGCAAGAACCGATCACATGGAGAAGGCAATGAAAGACAAGGAGGAGC
AATGGAAGAGAGAAAATGAGAAGATGGAAGGGATGTGAAAATGTTTGAA
AAAAACGAGGTGATCAGTTTTAAAATACGAATTTAGTATTTTCTTTTTA
AGAAAATTCTTTCGGAAAGTCGTGTTTTAAAACATGACTTTTATTTATT
TGAAGTCGTGTTCTAAAACATGACTTTATTTCATATCCTTTAATATTTT
ATATCCTTAATATTTTTAAAATTTATCCATTTGTAATATTTTTTAAAAA
TTGACCCATATATGTAAAATACCCGTCAAGATCTCTTTATTATTTTGAA
AGCGAAAGCA.

[0296] The E2F binding site (4X) (5′/Phos/C*C*CGCCAAACCCGCCAAACCCGCCAAACCCGCCA*A*A-3′, SEQ ID NO:213) is inserted in Cas9/guide RNA cutting site, 357 bp, 251 bp, or 31 bp upstream of TSS. The crRNA sequences are UUGUUGGAAAAGAAGCUAUGGUUUUAGAGCUAUGCU (SEQ ID NO:717), GAAAAUGUUUGAAAAAAACGGUUUUAGAGCUAUGCU (SEQ ID NO:718), and AAAUAAUAAAGAGAUCUUGAGUUUUAGAGCUAUGCU (SEQ ID NO:719).

[0297] As an exemplary assay for readout, QPCR can be used to check the transcript level of FT2a when transiently expressing Arabidopsis E2F-a (doi:10.1074/jbc.M205125200) compared to the control (non-edited). Flowering and architecture phenotype are compared to the wild-type (non-edited).

### Example 15

[0298] Stay-green refers to the heritable delayed foliar senescence character in model and crop plant species. In functional stay-greens, the transition from the carbon capture period to the nitrogen mobilization (senescence) phase of canopy development is delayed. Quantitative trait loci studies show that functional stay-green is a valuable trait for improving crop stress tolerance (doi:10.1093/jxb/eru037). Virus-induced gene silencing-mediated silencing of GmNAC81 (GeneID: 732555) delayed leaf senescence and was associated with reductions in chlorophyll loss and lipid peroxidation. Insertion of a silencer to downregulate the expression of GmNAC81 could lead to functional stay-green phenotype (doi:10.1093/pcp/pcw059).

[0299] NAC81 promoter (500 bp upstream of TSS) is:

(SEQ ID NO: 720)
CGTACATTTTTTTTCTTACATGCTGAAATGGAAGAAATTAAAGAACATA
AAGTATAAAGTATGGTCATGAAAATTGTAAGAGGAATTTCCGGGTAAAA
GTCCAAAACCGAAAGAAAAAATAGGTCAAGCCATAACATGTATATGCTG
TCCCACCACAGTTTAGTCTCTGCAGACTTTTTGTCAAGCCGCGTGGGTC
CCACTTCTGGCGGACCCACCACACTAATGTCGTAATAATGTGGAGAGTC
GCAATTACAAGTCCATTTTCTTTCAAGATTTCTTAGAGACTTTTGTGCC
CCCTAGGCCTCCACGACCAAGTCATAACCCAAACTCAAATATTTAATAA
AAATAAATCCATCAATTAGCATAGTTATGAAACCAACCATTCCTTATAA
ATACCCTCACAACACATATTCATTTTATATCAACTAACTTTGTGCTTCC
TCCGCAGAAAAATAAAAAAAGAGTAGCTAGCACTAGCTAGCTAAACACA
GTACGAGTAG.

[0300] The Silencer element (5′-/Phos/G*A*ATA TAT ATA TAT*T*C-3′, SEQ ID NO:215) is inserted in Cas9/guide RNA cutting site, 342 bp, 201 bp, or 98 bp upstream of TSS to decrease the expression of NAC81. The crRNA sequences are

(SEQ ID NO: 721)
AGUCUGCAGAGACUAAACUGGUUUUAGAGCUAUGCU,
(SEQ ID NO: 722)
ACUUGGUCGUGGAGGCCUAGGUUUUAGAGCUAUGCU,
and
(SEQ ID NO: 723)
UAAAAUGAAUAUGUGUUGUGGUUUUAGAGCUAUGCU.

[0301] As an exemplary assay for readout, QPCR can be used to check the transcript level of NAC81.

### Example 16

[0302] MicroRNAs (miRNAs) regulate gene expression by mediating gene silencing at transcriptional and post-transcriptional levels in higher plants. U.S. Pat. No. 9,040,774 B2 provides the methods for manipulating expression of a miRNA regulated target gene by interfering with the binding of the miRNA to its target gene. The miR172 family target mRNAs coding APETALA2-like transcription factors. Utilization of decoy or miRNA cleavage blocker of miR172 showed improved yield in multiple crops including soybean (see Table 3 in U.S. Pat. No. 9,040,774 B2). Mutation of miRNA targeting site in its target genes listed in Table 7 can lead to improved yield.

TABLE 7

| miRNA | Target Gene | Target Gene Annotation |
|---|---|---|
| gma-MIR172b- | Glyma01g39520 | transcription factor activity |
| 5p | Glyma03g33470 | transcription factor activity |
| | Glyma05g09400 | protein kinase C activation |
| | Glyma11g05720 | transcription factor activity |
| | Glyma11g10790 | RNA-binding protein |
| | Glyma14g01950 | A2L zinc ribbon domain |
| | Glyma19g36200 | transcription factor activity |
| gma-MIR172c | Glyma01g39520 | AP2 domain-containing transcription factor |
| | Glyma03g33470 | AP2 domain-containing transcription factor |
| | Glyma05g18170 | AP2 domain-containing transcription factor |
| | Glyma05g31790 | GTPase Rab2, small G protein superfamily |
| | Glyma08g15040 | GTPase Rab2, small G protein superfamily |
| | Glyma11g05720 | AP2 domain-containing transcription factor |
| | Glyma11g15650 | AP2 domain-containing transcription factor |
| | Glyma12g07800 | AP2 domain-containing transcription factor |
| | Glyma13g40470 | AP2 domain-containing transcription factor |
| | Glyma15g04930 | AP2 domain-containing transcription factor |
| | Glyma17g18640 | AP2 domain-containing transcription factor |
| | Glyma19g36200 | AP2 domain-containing transcription factor |
| gma-MIR172g | Glyma06g15630 | ubiquitin-protein ligase activity |
| | Glyma10g27970 | ATP binding cassette protein |
| gma-MIR172h- | Glyma01g39520 | AP2 domain-containing transcription factor |
| 3p | Glyma03g33470 | AP2 domain-containing transcription factor |
| | Glyma11g05720 | AP2 domain-containing transcription factor |
| | Glyma11g15650 | AP2 domain-containing transcription factor |
| | Glyma12g07800 | AP2 domain-containing transcription factor |
| | Glyma13g40470 | AP2 domain-containing transcription factor |
| | (GeneID: 100777102) | |
| | Glyma15g04930 | AP2 domain-containing transcription factor |
| | Glyma19g36200 | AP2 domain-containing transcription factor |
| gma-MIR172h- | Glyma06g13450 | putative ATP-dependent Clp-type protease |
| 5p | Glyma10g08730 | nitrate, fromate, iron dehydrogenase |
| | Glyma10g30570 | targeting protein for Xklp2 |
| | Glyma11g05580 | GTP-binding ADP-ribosylation factor |
| | Glyma11g06830 | ubiquitin-protein ligase |
| | Glyma15g12600 | protease inhibitor |

[0303] RAP2-7-LIKE Exon 10 (miR172 targeting site is underlined) is:

(SEQ ID NO: 724)
GAAAGAGCAGAGAGAATGGGCACAGATCCTTCAAAAGGAGTCCCAAACCC
CAACTGGGCGTGGCAAACACATGGCCAGGTTACTGACACCCCAGTACCAC
CGTTCTCTACTGCAGCATCATCAGGATTCTCAATTTCAGCCACTTTTCCA
TCAACTGCCATCTTTCCAACAAAATCCATCAACTCAGTTCCCCATAGCCT
CTGTTTCACTTCACCCAGCACACCAGGTAGCAACGCACCTCAATTCTATA
ACTATTACGAGGTGAAGTCCCCGCAGCCACCGTCCTAG.

[0304] Cas9/guide RNA has cutting site at 3968 bp downstream of TSS. The crRNA sequence is GAUGCUGCAGUAGAGAACGGGUUUUAGAGCUAUGCU (SEQ ID NO:725).

[0305] Donor template consisting silent mutations of the miR172 targeting site with flanking regions of 100 bp (underlined) is:

(SEQ ID NO: 726)
GAGAATGGGCACAGATCCTTCAAAAGGAGTCCCAAACCCCAACTGGGCGT
GGCAAACACATGGCCAGGTTACTGACACCCCAGTACCACCGTTCTCTACT
GCTGCCTCTTCCGGTTTTTCCATTTCAGCCACTTTTCCATCAACTGCCAT
CTTTCCAACAAAATCCATCAACTCAGTTCCCCATAGCCTCTGTTTCACTT
CACCCAGCACACCAGGTAGCA.

[0306] As an exemplary assay for readout, QPCR can be used to check the transcript level of RAP2-7-like.

### Example 17

[0307] Photoperiod responsiveness is a key factor in latitudinal adaption of soybean. Introduction of the long juvenile trait extends the vegetative phase and improves yield under short-day conditions, thereby enabling expansion of cultivation in tropical regions. J (GeneID: 100793561), the major classical locus conferring the trait, is the ortholog of Arabidopsis thaliana EARLY FLOWERING 3(ELF3). J protein downregulate E1 transcription, relieving repression of two important FLOWERING LOCUS T (FT) genes and promoting flowering under short days (doi:10.1038/ng.3819). Reduction of the J transcript level can release E1 from repression and E1 then repress FT2a and FT5a, resulting in improving adaptation of varieties from temperate regions to the tropics and enhancing the yield.

[0308] J 3′-UTR region (344 bp) is:

(SEQ ID NO: 727)
TGATGGTTCAAGTAGTTTGTCTAGTTCCTGTACTTTCTTGGAGTATGTCA
TGTAACGAGCTGTTGTATTTATAATTTTTGTTTTGGTTTTTGACCTTGTT
ACATACAGCACATTGGTATGTAGATATATCTGGCATATCAAAACTGGTCA
AAATGTAACATTATTTTATGGTATCATGTTGTTTCCATACATAAGTGTTC
GTTTTACACAGTAGTAATTGCTTTACCCGAAAGAGTAGGTGCTCTGCTTC
CTCTGTGCATGGGAGGAGGTTTTATATTGCTTGCCTAGAAGACTAGTGAT
TGTCATACACATTAGCTGTTATTCTAATTGATTGTTTCATGTCA.

[0309] The mRNA destabilizing element (doi:10.1105/tpc.107.055046) (5′/Phos/A*A*TTTTAATTTTAATTTTAATTTTAATTTTAATT*T*T-3′, SEQ ID NO:214) is inserted in Cas9/guide RNA cutting site, 5032 bp, 5110 bp, or 5255 bp downstream of TSS. The crRNA sequences are GACAUACUCCAAGAAAGUACGUUUUAGAGCUAUGCU (SEQ ID NO:728), CCUUGUUACAUACAGCACAUGUUUUAGAGCUAUGCU (SEQ ID NO:729), and AAACCUCCUCCCAUGCACAGGUUUUAGAGCUAUGCU (SEQ ID NO:730).

[0310] As an exemplary assay for readout, QPCR can be used to check the transcript level of J. Phenotypic readout of edited plants can be determined with late flowering.

### Example 18

[0311] Abscisic acid (ABA) plays a crucial role in the plant response to both biotic and abiotic stresses. Mutations in PYR/PYL receptor proteins have been identified that result in hypersensitivity to ABA to enhance plant drought resistance (U.S. Patent Application Publication 2016/0194653). Mutation on GmPYL9 (GeneID: 100810273) E137 corresponding to the amino acid E141 in Arabidopsis thaliana PYR1 can enhance the sensitivity to ABA.

[0312] GmPYL9 exon 3 (216 bp, 2827-3042 bp downstream of TSS, the nucleotides encoding E137 are underlined) is:

(SEQ ID NO: 731)
AACTATTCTTCCATAATCACCGTCCATCCAGAGGTCATCGATGGGAGACC
CGGTACAATGGTGATCGAATCATTTGTGGTGGATGTGCCTGATGGGAACA
CCAGGGATGAAACTTGTTACTTTGTGGAGGCTTTGATCAGGTGTAACCTA
AGCTCTTTAGCTGATGTCTCAGAGAGGATGGCCGTGCAAGGTCGAACCAA
TCCTATCAACCATTAA.

[0313] Amino acid sequence encoded by this region with E137 underlined which is mutated to L to increase GmPYL9 sensitivity to ABA is

(SEQ ID NO: 732)
NYSSIITVHPEVIDGRPGTMVIESFVVDVPDGNTRDETCYFVEALIRCNL
SSLADVSERMAVQGRTNPINH*.

[0314] Cas9/guide RNA with cutting site at 2902 bp downstream of TSS is GGUGAUCGAAUCAUUUGUGGGUUUUAGAGCUAUGCU (SEQ ID NO:733).

[0315] Donor template consisting E137 mutated to L with flanking regions of 100 bp (underlined) is

(SEQ ID NO: 734)
GGTTTAATACTCAATCATGTTGTGGAATTTGCAGAACTATTCTTCCATAA
TCACCGTCCATCCAGAGGTCATCGATGGGAGACCCGGTACAATGGTGATC
CTATCATTTGTGGTGGATGTGCCTGATGGGAACACCAGGGATGAAACTTG
TTACTTTGTGGAGGCTTTGATCAGGTGTAACCTAAGCTCTTTAGCTGATG
TC.

[0316] As an exemplary assay for readout, CRISPR amplicon sequencing can be used to confirm the GA to CT mutation. Seedlings of edited plants can be treated with 10 uM ABA for 1 hour and then the expression level of ABA inducible genes can be measured (higher in edited seedlings compared to the wild-type control).

### Example 19

[0317] Soybean is a short-day crop with high protein and oil contents. Many cultivars have been bred with different maturity to adapt to various environments. Flowering and maturity are highly controlled by major genes in soybean. Up to now, nine maturity loci have been identified as E1-E8 and J. E2 (GeneID: 100800578) is an orthologue of Arabidopsis flowering gene GIGANTEA. E2 delays flowering and maturity under long day length condition through downregulating GmFT2a and GmFT5a. Recessive e2 promote flowering and maturity (doi:10.1534/genetics.110.125062). Higher methylation at the promoter of E2 gene can reduce its expression and generate a weaker epiallele for early flowering and maturity.

[0318] Constructs for dCas9-SunTag and anti-GCN4 scFv fused to proteins involved in RNA-directed DNA methylation, for example, DEFECTIVE IN MERISTEM SILENCING3 (DMS3), the de novo DNA methyltransferase DOMAINS REARRANGED METHYLTRASFERASE2 (DRM2) or tobacco DRM catalytic domain (doi:10.1016/j.cell.2014.03.056) are used to target E2 gene promoter for increasing methylation.

[0319] E2 gene promoter (539 bp, including 300 bp upstream of TSS and 5′-UTR in uppercase) is:

(SEQ ID NO: 735)
aaattctaaaaataaaaaaaataatttataaggataaaaaaattaaatca
taaaaatcaaaaagatatttcaaccttaacgttaaatacatatgtaataa
tacagttagaattacaaataaggtgactgcagtagaatatatgtgtaatg
acgatggatgggcatccatgtccatgataaagatggatggacatgaacat
acatacatatgtgtaagagtagcatgacgtgacacggggtaggactcagg
aggtgagaggaaaatatcattgccacgtattcaatcaatctaggcttctc
AGAGCTGCTAAAGATCTTCTCTTTCTTTCTCTCTCCCAGTTGTGTTCTCT
TCTCTAGTTTGTTTCTGCAGTTTTGCCTCTCTCTCTCTCTCTCTCACTAT
CTATCTATCCCACCATAACCATTAACCACCACCTCTTAAATATTTTTCCA
CAAATCACCAAAATTTCCCATTTTTTTCACCCTCTGAATCACAATTTTTT
TCTTTCTAACTAAAATCGCCTCTACACACAAGGATTCAG.

[0320] Three guide RNAs targeting region in the promoter and 5′-UTR regions of E2 gene are designed to bring DNA methyltransferase or DMS3 to increase promoter methylation level. The crRNA sequences are GAGUAGCAUGACGUGACACGGUUUUAGAGCUAUGCU (SEQ ID NO:736), GCCUAGAUUGAUUGAAUACGGUUUUAGAGCUAUGCU (SEQ ID NO:737), and CUAGAGAAGAGAACACAACUGUUUUAGAGCUAUGCU (SEQ ID NO:738).

[0321] As an exemplary assay for readout, QPCR can be used to check the transcript level of E2 gene and bisulfate sequencing can be used to determine the targeted methylation region in the promoter and 5′-UTR.

### Example 20

[0322] This example describes the preparation of reagents for the modification of three genes in a soybean plant cell to provide increased nitrogen use efficiency.

[0323] Soybean protoplasts are prepared as described in Examples 1-5. Preparation of reagents for gene editing is carried out using procedures similar to those described in Examples 6-9.

[0324] An increase in expression of NRT (GLYMA_12 G078900) is predicted to increase nitrogen use efficiency (NUE). The sequence of NRT is shown as AATTTAATCTAATGGTAGATAATGTGTTCAAAGGAACGCTTGATAACATTTCTCGTGATAAA TACGTATTTATGAGACTATTTAGTTATGATCATCCA [symbol] AAAGTAA TGATCATGTGCCAAGTTGCCACCCATAATTTATCTCAAAATTAATGAAACCCAAATAAAGGC GTTGAATAATACCACCATACAAAAGTGTGTTATTTAGCAGCATATGTAACTAGGCATATATC TATCTGTATATATGAGAGTTGATTATGTGTCACATAT [symbol] [symbol] GGGTTC TTTTTGGCATACGCGGCGAAATGGATTACGTCAAATACAGCTTTTGTTTAATGCTTAAAGCTT TGGCAGCCGATGGAAATTTCATTGGCATTGTCAACGCCTTCCCCTACTATAAGTACAATCAC ACTCCT [symbol] [symbol] AGGCCTTCAATTTGGTTTTGTTTCATCAGTTTTCCAGA TACAGCACATTGATTGTTAAGGCGAAATGGCTGATATTGAGGGTT (SEQ ID NO:739). Similar to the previous examples, a nitrogen-responsive element (NRE) sequence having the sequence of AGAAACAACTTGACCCTTTACATTGCTCAAGAGCTCATCTCTT (SEQ ID NO:740) and encoded by a polynucleotide (such as a double-stranded DNA, a single-stranded DNA, a single-stranded DNA/RNA hybrid, or a double-stranded DNA/RNA hybrid) donor molecule is designed for insertion at a double-strand break effected between nucleotides at positions 101/102, 303/304, and 446/447 of SEQ ID NO:739 in order to enhance the expression of NRT. Three NRT crRNAs are designed to target the nucleotides shown in bold italic in SEQ ID NO:739 and have the sequences of AGUGUUGUGAGGGAGAGACAGUUUUAGAGCUAUGCU (SEQ ID NO:741), GAACCUUUGAGACAUACCAUGUUUUAGAGCUAUGCU (SEQ ID NO:742), and GGGUUGGAAAUUAAUUGACAGUUUUAGAGCUAUGCU (SEQ ID NO:743). All crRNAs and tracrRNA are purchased from Integrated DNA Technologies, Coralville, Iowa Ribonucleoprotein (RNP) complexes are prepared using gRNA (crRNA:tracrRNA) and Cas9 nuclease (Aldevron, Fargo, N. Dak.).

[0325] An increase in expression of NRT and NRT2 (Glyma13g39850.1) simultaneously is predicted to further increase nitrogen use efficiency (NUE). A partial genomic sequence of NRT2 is provided as TTGTTTACTCCTAGTTATTATCTTAAAAAAATTGAATCATATAATTATATATTAAGTTTTGAA TATGTGTTTCCATCTTATAGTTTATGAGATTACCA [symbol] [symbol] CTACAAAC TTTAAAAGTAAGCAGTAGATACATAATAGTTTTATAGGCCTGGTTGGTTAGC [symbol] [symbol] CGGATAATGAACCCCAATGATGAAAACATGCAGACGCATGTTGCAGCATGGA AGTATTTTATTTAATAAGAATAATAATAAGGTAAGTGGTAGTAATTAAATTCCATATTCAGT ATCATGGGAAATGAGATTCTTTGCCTTTGGGATACACCATTAGGCTTTTAGCCGTTCCA [symbol] [symbol] GCATTACTCCATGGCCCTTGGGAATCCACTTGCCTCCTATCAGACTC TTACGTAGTCAACGCCTTCGCCTACTATAAAAACAC (SEQ ID NO:744), a nitrogen-responsive element (NRE) sequence having the sequence of SEQ ID NO:740 and encoded by a polynucleotide (such as a double-stranded DNA, a single-stranded DNA, a single-stranded DNA/RNA hybrid, or a double-stranded DNA/RNA hybrid) donor molecule is designed for insertion at a double-strand break effected between nucleotides at positions 101/102, 195/196, and 374/375 of SEQ ID NO:744 in order to enhance the expression of NRT2. Three NRT2 crRNAs are designed to target the nucleotides shown in bold italic in SEQ ID NO:744 and have the sequences of AUUUCGCCGCAUAUACACAGGUUUUAGAGCUAUGCU (SEQ ID NO:745), UGAAAUUUACAGCUACUACGGUUUUAGAGCUAUGCU (SEQ ID NO:746), and AUCCCAAUCUGUUAAACACAGUUUUAGAGCUAUGCU (SEQ ID NO:747). All crRNAs and tracrRNA are purchased from Integrated DNA Technologies, Coralville, Iowa Ribonucleoprotein (RNP) complexes are prepared using gRNA (crRNA:tracrRNA) and Cas9 nuclease (Aldevron, Fargo, N. Dak.).

[0326] An increase in expression of NRT, NRT2 and glutamine synthase (GS, Glyma.07G104500) simultaneously can even further increase nitrogen use efficiency (NUE). Constitutive overexpression of GS has been shown to result in increased photosynthesis under low nitrate conditions (see, e. g., doi:10.1104/pp. 020013). In this example, the expression of GS is constitutively increased by inserting a constitutive enhancer sequence. A partial genomic sequence of GS is provided as CAAAAATTAATTCTTTTTAGTAATGATAGAATCTAATATCTTAATTCAATGATTAATTATAACT TAAGTCTTCCTTTAAAATAAATCTCATCTCATCTCCT [symbol] [symbol] ATCTCAT CTCATTCTTCGGTGATCAAATCTAGTGCCAGTACCGTACTTGGTACGCTACCTTCACTTGCCT [symbol] [symbol] ACCTACCTTTCATAATTTAATATAAAAAATAAATAAACAATGTCG CTGCAAAGCATGTTCATGTTCATTAATTCATTTTTATTATTAAAAAAAAAACACCCCTTTATT [symbol] [symbol] CGGTATCTTTCCACCACTTTCTTTATCTTTAGAGATCTTCTTTTAT ATATATATATATATATAGATAGATAGATAGATAGATACAGAGATGAAAAATACT (SEQ ID NO:748). A maize OCS homologue encoded by a chemically modified single-stranded DNA with the sequence of GTAAGCGCTTAC (SEQ ID NO:749, Integrated DNA Technologies, Coralville, Iowa), phosphorylated on the 5′ end and containing two phosphorothioate linkages at each terminus (i.e., the two linkages between the most distal three bases on either end of the strand) is designed for insertion at a double-strand break effected between nucleotides at positions 103/104, 193/194, and 331/332 of SEQ ID NO: 748 in order to provide constitutively increased expression of GS. A GS crRNA is designed to target the nucleotides shown in bold italic in SEQ ID NO:748 and has the sequences of GUGAUAGCUGAUAAGCACAUGUUUUAGAGCUAUGCU (SEQ ID NO:750), UUAGGCGGCGGAAAAACUCAGUUUUAGAGCUAUGCU (SEQ ID NO:751), and UCUCUCUCAAAAAAGGAAGAGUUUUAGAGCUAUGCU (SEQ ID NO:752). The crRNA and tracrRNA are purchased from Integrated DNA Technologies, Coralville, Iowa Ribonucleoprotein (RNP) complexes are prepared using gRNA (crRNA:tracrRNA) and Cas9 nuclease (Aldevron, Fargo, N. Dak.).

### Example 21

[0327] This example describes the modification of two soybean genes to make early flowering soybeans.

[0328] FT2a and E2 regulate flowering time in soybean. The gene modification for increasing the expression of FT2a is described in Example 14. The gene modification for making the epigenetic change of E2 is described in Example 19.

[0329] As an exemplary assay for readout, QPCR can be used to check the transcript level of FT2a and E2. The edited plants are measured for flowering time.

### Example 22

[0330] It is predicted that modification of NRT, NRT2, and GS in soybean will result in soybean cells with increased nitrogen use efficiency (NUE), and, further that the additional modification of FT2a will result in early flowering, higher yielding soybean plants (see, e. g., U.S. Patent Application Publication 20160304891 A1, incorporated herein by reference).

[0331] Soybean protoplasts are prepared as described in Examples 1-5. Preparation of reagents is completed essentially as described in Examples 6-10.

[0332] An increase in expression of NRT (GLYMA_12 G078900) is predicted to increase nitrogen use efficiency (NUE). The sequence of NRT is shown as SEQ ID NO:739. Similar to the previous examples, a nitrogen-responsive element (NRE) sequence having the sequence of SEQ ID NO:740 and encoded by a polynucleotide (such as a double-stranded DNA, a single-stranded DNA, a single-stranded DNA/RNA hybrid, or a double-stranded DNA/RNA hybrid) donor molecule is designed for insertion at a double-strand break effected between nucleotides at positions 101/102, 303/304, and 446/447 of SEQ ID NO:739 in order to enhance the expression of NRT. Three NRT crRNAs are designed to target the nucleotides shown in bold italic in SEQ ID NO:739 and have the sequences of SEQ ID NOs:741, 742, and 743. All crRNAs and tracrRNA are purchased from Integrated DNA Technologies, Coralville, Iowa Ribonucleoprotein (RNP) complexes are prepared using gRNA (crRNA:tracrRNA) and Cas9 nuclease (Aldevron, Fargo, N. Dak.).

[0333] An increase in expression of NRT and NRT2 (Glyma13g39850.1) simultaneously is predicted to further increase nitrogen use efficiency (NUE). A partial genomic sequence of NRT2 is provided as SEQ ID NO:744, a nitrogen-responsive element (NRE) sequence having the sequence of SEQ ID NO:740 and encoded by a polynucleotide (such as a double-stranded DNA, a single-stranded DNA, a single-stranded DNA/RNA hybrid, or a double-stranded DNA/RNA hybrid) donor molecule is designed for insertion at a double-strand break effected between nucleotides at positions 101/102, 195/196, and 374/375 of SEQ ID NO:744 in order to enhance the expression of NRT2. Three NRT2 crRNAs are designed to target the nucleotides shown in bold italic in SEQ ID NO:744 and have the sequences of SEQ ID NOs: 745, 746, and 747. All crRNAs and tracrRNA are purchased from Integrated DNA Technologies, Coralville, Iowa Ribonucleoprotein (RNP) complexes are prepared using gRNA (crRNA:tracrRNA) and Cas9 nuclease (Aldevron, Fargo, N. Dak.).

[0334] An increase in expression of NRT, NRT2 and glutamine synthase (GS, Glyma.07G104500) simultaneously can even further increase nitrogen use efficiency (NUE). Constitutive overexpression of GS has been shown to result in increased photosynthesis under low nitrate conditions (see, e. g., doi:10.1104/pp. 020013). In this example, the expression of GS is constitutively increased by inserting a constitutive enhancer sequence. A partial genomic sequence of GS is provided as SEQ ID NO:748. A maize OCS homologue encoded by a chemically modified single-stranded DNA with the sequence of SEQ ID NO:749 (Integrated DNA Technologies, Coralville, Iowa), phosphorylated on the 5′ end and containing two phosphorothioate linkages at each terminus (i. e., the two linkages between the most distal three bases on either end of the strand) is designed for insertion at a double-strand break effected between nucleotides at positions 103/104, 193/194, and 331/332 of SEQ ID NO: 748 in order to provide constitutively increased expression of GS. A GS crRNA is designed to target the nucleotides shown in bold italic in SEQ ID NO:748 and has the sequences of SEQ ID NO: ID NO:750, 751, and 752. The crRNA and tracrRNA are purchased from Integrated DNA Technologies, Coralville, Iowa Ribonucleoprotein (RNP) complexes are prepared using gRNA (crRNA:tracrRNA) and Cas9 nuclease (Aldevron, Fargo, N. Dak.).

[0335] FT2a (Glyma.16G150700) is the mobile flowering trigger in soybean and an increase in expression of FT2a is anticipated to trigger flowering. Early flowering is not normally a desirable phenotype as early-flowering plants do not maintain high vegetative growth rates, resulting in overall lower yields. It is predicted that a short burst of FT2a expression will be sufficient to trigger flowering while allowing the plants to maintain vegetative growth, resulting in an everbearing and high-yielding phenotype. Thus, in addition to the increased nitrogen utilization efficiency achieved by modification of NRT, NTR2, and GS, an auxin-inducible element is integrated in the promoter of the FT2a gene. A partial genomic sequence of FT2a is provided as AAAGAAGCTATGAGGTGCAAGAACCGATCACATGGAGAAGGCAATGAAAGACAAGGAGGA GCAATGGAAGAGAGAAAATGAGAAGATGGAAGGGATGT [symbol] [symbol] AGG TGATCAGTTTTAAAATACGAATTTAGTATTTTCTTTTTAAGAAAATTCTTTCGGAAAGTCGTG TTTTAAAACATGACTTTTATTTATTTGAAGTCGTGTTCTAAAACATGACTTTATTTCATATCCT TTAATATTTTATATCCTTAATATTTTTAAAATTTATCCATTTGTAATATTTTTTAAAAATTGAC CCATATATGTAAAATACCC [symbol] [symbol] TTGAAAGCGAAAGCATATCACTTC AAACACAATGGAATCGAGGCTATTGACTAAGTATAA [symbol] [symbol] GGGGTTC ATAATTCATAACAAAGCAAACGAGTATATAAGAAAGCATAAGCCAAATTTTGAGTAAACTA GTGTGCACACTATCCC (SEQ ID NO:753). The auxin-responsive element 3×DR5 with the sequence of GCUCCUCACUAGCUACCAAGGUUUUAGAGCUAUGCU (SEQ ID NO:754) is provided as a polynucleotide (e. g., as a double-stranded DNA, a single-stranded DNA, a single-stranded DNA/RNA hybrid, or a double-stranded DNA/RNA hybrid) donor molecule for insertion at a double-strand break effected between nucleotides at positions 115/116, 334/335, and 428/429 of SEQ ID NO:753. A FT2a crRNA is designed to target the nucleotides shown in bold italic in SEQ ID NO: 753 and has the sequences of GAAAAUGUUUGAAAAAAACGGUUUUAGAGCUAUGCU (SEQ ID NO:755), AUAGAGAAGACUUCAUAUCGGUUUUAGAGCUAUGCU (SEQ ID NO:756) and AAUAAUAAAGAGAUCUUGACGUUUUAGAGCUAUGCU (SEQ ID NO:757). The crRNA and tracrRNA are purchased from Integrated DNA Technologies, Coralville, Iowa Ribonucleoprotein (RNP) complexes are prepared using gRNA (crRNA:tracrRNA) and Cas9 nuclease (Aldevron, Fargo, N. Dak.).

### Example 23

[0336] This example describes additional genomic modifications that further enhance the effects of the modifications of soybean genes described in Example 22. E1 (Glyma.06G207800.1) is a large effect flowering time gene in soybean and has been reported to be a repressor of two genes involved in the induction of flowering, FT2a and FT5a (see, e. g., DOI:10.1104/pp. 15.00763). It is predicted that by stacking the inducible increased expression of FT2a described in Example 22 with a modest decrease in expression of E1 will result in early flowering with increased yield outcomes. In this example, a SAUR mRNA destabilizing sequence is integrated in the 3′ untranslated region (3′ UTR) of the E1 gene. SAUR destabilizing sequences result in reduced expression due to increased mRNA degradation (see, e. g., doi:10.1105/tpc.5.6.701, and U. S. Patent Application Publication 2007/0011761, incorporated herein by reference). A partial genomic sequence of E1 is provided as ATCGGATTTCATTGGGATCCATATAATTGCGTTTTCAATTTCTGTGTCCTTAAACAAGCTATG CCAGAGAATTAATTTAATTTTAAGTGTTAGCTTTATT [symbol] [symbol] AGGAAA ACAATGGCCTATATATTATTCCT [symbol] [symbol] TTATTGCAATAGCGTGTACTT CAACCTAATTATTTAATACCAAGTTTCTATATTAATGTTGTATCTTATGAAATCCTTCTATTTT CCATTCTATAAATTA (SEQ ID NO:758). A SAUR mRNA destabilizing element with the sequence of AGATCTAGGAGACTGACATAGATTGGAGGAGACATTTTGTATAATAAGATCTAGGAGACTG ACATAGATTGGAGGAGACATTTTGTATAATA (SEQ ID NO:759) is designed for insertion at a double-strand break effected between nucleotides at positions 117/118 or 152/153 of SEQ ID NO:758. The SAUR destabilizing element in the form of a single-stranded DNA molecule, phosphorylated on the 5′ end and containing two phosphorothioate linkages at each terminus (i. e., the two linkages between the most distal three bases on either end of the strand) is purchased from Integrated DNA Technologies, Coralville, Iowa A E1 crRNA is designed to target the nucleotides shown in bold italic in SEQ ID NO:758 and has the sequences of AUUUUACUUUCAAAUCAUUGGUUUUAGAGCUAUGCU (SEQ ID NO:760) and CAUUAUUGUAUGUUACAUAUGUUUUAGAGCUAUGCU (SEQ ID NO:761). The E1 crRNA and tracrRNA are purchased from Integrated DNA Technologies, Coralville, Iowa Ribonucleoprotein (RNP) complexes are prepared using gRNA (crRNA:tracrRNA) and Cas9 nuclease (Aldevron, Fargo, N. Dak.).

### Example 24

[0337] This example describes the modification of two soybean genes to increase drought resistance and to enhance determinant growth.

[0338] Modification of GmPYL9 gene and dt1 gene together can increase drought resistance and enhance determinant growth. The modification of GmPYL9 gene is described in Example 18. The modification of dt1 gene is described in Example 13.

[0339] As an exemplary assay for readout, QPCR can be used to check the transcript level of GmPYL9 and dt1. The edited plants can be tested for drought resistance and determinant growth.

### Example 25

[0340] Soy productivity can be improved by targeting processes associated with non-photochemical quenching (NPQ). This is a strategy to increase photosynthetic efficiency. Orthologous genes to those targeted in Kromdjik et al. (2016, Science, 354 (6314): 857-61) can be up-regulated by inserting an enhancer element in the promoter proximal region of the soybean orthologous genes for the chloroplastic photosystem II 22 kDa protein (PsbS), violaxanthin de-epoxidase (VDE) and zeoxanthin epoxidase (ZEP). Upregulation of each individual gene in model plants has a low to marginal effect on photosynthetic efficiency (Hubbart et al., 2012, The Plant Journal: For Cell and Molecular Biology, 71 (3): 402-12; Leonelli et al., 2016, The Plant Journal: For Cell and Molecular Biology, 88 (3): 375-86). The combined effect of up-regulating all three genes produces a much larger effect. Kromdjik et al. (2016) demonstrated this in tobacco by inserting transgenes driven by highly active green tissue-preferred promoters. Here we demonstrate how this can be done using gene editing technology.

[0341] There is scattered evidence for ‘enhancer’ elements that function in plants, and may be applicable here (Marand et al., 2017, Plant Gene Regulatory Mechanisms and Networks, 1860 (1): 131-39). Most of the heavily used cis-enhancer elements come from plant pathogens. For example, there are well characterized virus-derived enhancer elements that work well in crops like maize (Davies et al., 2014, BMC Plant Biology, 14 (December): 359) but these are less desirable due to their length (generally 1-200 bp). Technology to scan genomes for putative regulatory elements that are ˜20 bp in length is available. Most of the work has been done in Arabidopsis (Burgess et al., 2015, Current Opinion in Plant Biology, 27 (October): 141-47) and this remains a largely theoretical area. Here we use the nopaline synthase OCS element (5′-ACGTAAGCGCTTACGT-3, SEQ ID NO:210), Ellis et al., 1987, The EMBO Journal, 6 (11): 3203-8) to upregulate the three soybean NPQ genes. G-box (5′-/Phos/G*C* CAC GTG CCG CCA CGT GCC GCC ACG TGC CGC CAC GTG* C*C-3′, SEQ ID NO:211) and green tissue-specific promoter (GSP, 5′-/Phos/A*A*AATATTTATAAAATATTTATAAAATATTTATAAAATATTT*A*T-3′, SEQ ID NO:212) can also be used to upregulate the NPQ genes.

[0342] Gene editing strategies for increasing these genes expression by insertion of enhancer element in the promoter of the member of each family are listed in the Table 8 below.

TABLE 8

| Gene | | | Change in gene | |
|---|---|---|---|---|
| family | Member | Gene ID | activity | Element inserted |
| PSBS | Glyma.06G113200 | 100779417 | Increase expression | OCS, G-box, or GSP |
| | Glyma.04G249700 | 100807355 | Increase expression | OCS, G-box, or GSP |
| ZEP | Glyma.11g055700 | 100820171 | Increase expression | OCS, G-box, or GSP |
| | Glyma.17G174500 | 100800186 | Increase expression | OCS, G-box, or GSP |
| VDE | Glyma.03G253500 | 100816085 | Increase expression | OCS, G-box, or GSP |
| | Glyma.19G251000 | 100778118 | Increase expression | OCS, G-box, or GSP |

[0343] An appropriate guide RNA is designed to target Cas9 or its equivalent to one or more sites within 500 bp of each gene's transcription start site. The site-directed endonuclease can be delivered as a ribonucleoprotein (RNP) complex or encoded on plasmid DNA. Synthetic oligonucleotides representing 1-5 copies of the OCS element (Ellis et al. 1987) are co-delivered with the site-specific endonuclease. The design of each guide RNA can be developed and optimized in a soybean protoplast system, using qRT-PCR of mRNA from each target gene to report successful up-regulation. Alternatively, a synthetic promoter for each target gene, linked to a suitable reporter gene like eGFP, can be co-transfected with the site-specific RNPs and enhancer oligonucleotide into protoplasts to evaluate the efficacy of all possible guide RNAs to identify the most effective candidates for delivery to whole plant tissues. The most effective RNPs are used to insert the NPQ technology in soybean.

[0344] One of many published methods for introducing the OCS enhancer element into the predetermined target sites of the soybean NPQ genes can used to generate lines with enhanced photosynthetic activity. These include agrobacterium, viral or biolistic-mediated approaches (Senapati, 2016 (doi:10.9734/ARRB/2016/22300)). The RNPs and OCS element can also be introduced by microinjection.

[0345] Soybean tissues that are appropriate for genome editing manipulation include embryogenic callus, exposed shoot apical meristems and 1 DAP embryos. There are many approaches to producing embryogenic callus (Lee et al., 2013 (doi:10.5772/51076), Homrich et al., 2012 (doi:10.1590/S1415-47572012000600015), Maheshwari and Kovalchuk, 2016 (doi:10.1016/B978-1-893997-98-1.00014-2), Finer, 2016 (doi:10.1002/cppb.20039)). Shoot apical meristem explants can be prepared using a variety of methods in the art (Sticklen and Oraby, 2005 (doi:10.1079/IVP2004616), Baskaran and Dasgupta, 2012 (doi:10.1007/s13562-011-0078-x), Senapati, 2016 (doi:10.9734/ARRB/2016/22300)). This work describes how to prepare and nurture material that is adequate for microinjection.

[0346] To prepare soy explants for microinjection, soy seed sterilized, imbibed and dissected as described in Yang et al., 2016 (doi:10.1007/s11738-016-2081-2) or Luth et al 2015 (doi:10.1007/978-1-4939-1695-5_22). The cotyledon sections can be cultivated with or without the cytokinin, 6-benzylaminopurine (BAP) which produces de novo vegetative buds (Buising 1992 (lib.dr.iastate.edu/rtd/9821). The 2-3 mm embryonic axes are placed on the appropriate solid support medium and oriented for easy access using a microinjection needle.

[0347] Microinjection is used to target specific cells in the shoot apical meristem. For example, an injector attached to a Narashige manipulator on a dissecting microscope is adequate for injecting relatively large cells (e.g., the egg/synergids/zygote and the central cell). For smaller cells, such as those of the embryo or shoot apical meristem, a compound, inverted microscope with an attached Narashige manipulator can be used. Injection pipette diameter and bevel are also important. Use a high-quality pipette puller and beveler to prepare needles with adequate strength, flexibility and pore diameter. These will vary depending on the cargo being delivered to cells. The volume of fluid to be microinjected must be exceedingly small and must be carefully controlled. An Eppendorf Transjector yields consistent results (Laurie et al., 1999).

[0348] The genetic cargo can be RNA, DNA, protein or a combination thereof. For example to introduce the NPQ trait the cargo consists of the RNPs targeting the promoter proximal region of the soybean PsBS, VDE and ZEP genes, and the OCS enhancer element. The concentration of each cargo component will vary depending on the nature of the manipulation. Typical cargo volumes can vary from 2-20 nanoliters. After microinjection, treated plant parts are maintained on an appropriate media alone or supplemented with a feeder culture. Plantlets are transferred to fresh media every two weeks and to larger containers as they grow. Plantlets with a well-developed root system are transferred to soil and maintained in high-humidity for 5 days to acclimate. Plants are gradually exposed to the air and cultivated to reproductive maturity.

[0349] Several molecular techniques can be used to confirm that the intended edits are present in the treated plants. These include sequence analysis of each target site and qRT-PCR of each target gene. The NPQ trait is confirmed using photosynthesis instrument such as a Ciras 3 or Licor 6400, to compare modified plants to unmodified or wildtype plants. The NPQ trait is expected to increase biomass accumulation relative to wildtype plants.

### Example 26

[0350] Table 10 provides a list of genes in soybean associated with various traits including abiotic stress resistance, plant architecture, biotic stress resistance, photosynthesis, and resource partitioning. Within each trait, various non-limiting (and often overlapping) sub-categories of traits may be identified, as presented in the Table. For example, “abiotic stress resistance” may be related to or associated with changes in abscisic acid (ABA) signaling, biomass, cold tolerance, drought tolerance, tolerance to high temperatures, tolerance to low temperatures, and/or salt tolerance; the trait “plant architecture” may be related to or may include traits such as biomass, fertilization, flowering time and/or flower architecture, inflorescence architecture, lodging resistance, root architecture, shoot architecture, leaf architecture, and yield; the trait “biotic stress” may include disease resistance, insect resistance, population density stress and/or shading stress; the trait “photosynthesis” can include photosynthesis and respiration traits; the trait “resource partitioning” can include or be related to biomass, seed weight, drydown rate, grain size, nitrogen utilization, oil production and metabolism, protein production and metabolism, provitamin A production and metabolism, seed composition, seed filling (including sugar and nitrogen transport), and starch production and metabolism. By modifying one or more of the associated genes in Table 10, each of these traits may be manipulated singly or in combination to improve the yield, productivity or other desired aspects of a soybean plant comprising the modification(s).

[0351] Each of the genes listed in Table 10 may be modified using any of the gene modification methods described herein. In particular, each of the genes may be modified using the targeted modification methods described herein which introduce desired genomic changes at specific locations in the absence of off-target effects. Even more specifically, each of the genes in Table 10 may be modified using the CRISPR targeting methods described herein, either singly or in multiplexed fashion. For example, a single gene in Table 10 could be modified by the introduction of a single mutation (change in residue, insertion of residue(s), or deletion of residue(s)) or by multiple mutations. Another possibility is that a single gene in Table 10 could be modified by the introduction of two or more mutations, including two or more targeted mutations. In addition, or alternatively, two or more genes in Table 10 could be modified (e.g., using the targeted modification techniques described herein) such that the two or more genes each contains one or more modifications.

[0352] The various types of modifications that can be introduced into the genes of Table 10 have been described herein. The modifications include both modifications to regulatory regions that affect the expression of the gene product (i.e., the amount of proteins or RNA encoded by the gene) and modifications that affect the sequence or activity of the encoded protein or RNA (in some cases the same modification may affect both the expression level and the activity of the encoded protein or RNA). Modifying genes encoding proteins with the amino acid sequences listed in Table 10 (e.g., SEQ ID Nos: 456-495, 497-530, 535-646, 648-65 and 656), or sequences with at least 95%, 96%, 97%, 98%, or 99% identity to the protein sequences listed in Table 10, may result in proteins with improved or diminished activity. Methods of alignment of sequences for comparison are well known in the art. Two examples of algorithms that are suitable for determining percent sequence identity and sequence similarity are the BLAST and BLAST 2.0 algorithms, which are described in Altschul et al., (1977) Nuc. Acids Res. 25:3389-3402; and Altschul et al., (1990) J. Mol. Biol. 215:403-410, respectively. Software for performing BLAST analyses is publicly available through the National Center for Biotechnology Information. Optimal alignment of sequences for comparison can also be conducted, e.g., by the local homology algorithm of Smith and Waterman, (1970) Adv. Appl. Math. 2:482c, by the homology alignment algorithm of Needleman and Wunsch, (1970) J. Mol. Biol. 48:443, by the search for similarity method of Pearson and Lipman, (1988) Proc. Nat'l. Acad. Sci. USA 85:2444, by computerized implementations of these algorithms (GAP, BESTFIT, FASTA, and TFASTA in the Wisconsin Genetics Software Package, Genetics Computer Group, 575 Science Dr., Madison, Wis.), or by manual alignment and visual inspection (see, e.g., Brent et al., (2003) Current Protocols in Molecular Biology).

[0353] In some cases, targeted modifications may result in proteins with no activity (e.g., the introduction of a stop codon may result in a functionless protein) or a protein with a new activity or feature. Similarly, the sequences of the miRNAs listed in Table 10 may also be modified to increase, decrease or reduce their activity.

[0354] In addition to modifications to the encoded proteins or miRNAs, each of the gene sequences listed in Table 10 (e.g., the gene sequences of SEQ IDs 235-396 and 398-435) may also be modified, individually or in combination with one or more other modifications, to alter the expression of the encoded protein or RNA, or to alter the stability of the RNA encoding the corresponding protein sequence. For example, regulatory sequences affecting transcription of any of the genes listed in Table 10, including primer sequences and transcription factor binding sequences, can be modified, or introduced into, any of the gene sequences listed in Table 10 using the methods described herein. The modifications can effect increases in transcription levels, decreases in transcription levels, and/or changes in the timing of transcription of the genes under control of the modified regulatory regions. Targeted epigenetic modifications affecting gene expression may also be introduced.

[0355] One skilled in the art will be able to identify regulatory regions (e.g., regulatory regions in the gene sequences provided in Table 10) using techniques described in the literature, e.g., Bartlett A. et al, “Mapping genome-wide transcription-factor binding sites using DAP-seq.”, Nat Protoc. (2017) August; 12(8):1659-1672; O'Malley R. C. et al, “Cistrome and Epicistrome Features Shape the Regulatory DNA Landscape”, Cell (2016) September 8; 166(6):1598; He Y et al, “Improved regulatory element prediction based on tissue-specific local epigenomic signatures”, Proc Natl Acad Sci USA, (2017) February 28; 114(9):E1633-E1640; Zefu Lu et al, “Combining ATAC-seq with nuclei sorting for discovery of cis-regulatory regions in plant genomes”, Nucleic Acids Research, (2017) V45(6); Rurika Oka et al, “Genome-wide mapping of transcriptional enhancer candidates using DNA and chromatin features in maize”, Genome Biology (2017) 18:137. In addition, Table 9, provided herein, lists sequences which may be inserted into or otherwise created in the genomic sequences of Table 10 for the purpose of regulating gene expression and/or transcript stability.

[0356] The stability of transcribed RNA encoded by the genes in Table 10 (in addition to other genes), can be increased or decreased by the targeted insertion or creation of the transcript stabilizing or destabilizing sequences provided in Table 9 (e.g., SEQ ID Nos. 198-200, 202 and 214). In addition, Table 10 includes miRNAs whose expression can be used to regulate the stability of transcripts comprising the corresponding recognition sites. Additional miRNAs, miRNA precursors and miRNA recognition site sequences that can be used to regulate transcript stability and gene expression in the context of the methods described herein may be found in, e.g., U.S. Pat. No. 9,192,112 (e.g., Table 2), U.S. Pat. Nos. 8,946,511 and 9,040,774, the disclosures of each of which are incorporated by reference herein.

[0357] Any of the above regulatory modifications may be combined to regulate a single gene, or multiple genes, or they may be combined with the non-regulatory modifications discussed above to regulate the activity of a single modified gene, or multiple modified genes. The genetic modifications or gene regulatory changes discussed above may affect distinct traits in the soybean cell or plant, or they make affect the same trait. The resulting effects of the described modifications on a trait or trait may be additive or synergistic. Modifications to the soybean genes listed in Table 10 may be combined with modifications to other sequences in the soybean genome for the purpose of improving one or more soybean traits. The soybean sequences of Table 10 may also be modified for the purpose of tracking the expression or localizing the expression or activity of the listed genes and gene products.

TABLE 9

| Type of | | | |
|---|---|---|---|
| regulation | Name of element | Sequence | SEQ ID |
| regulatory control | ABFs binding site | CACGTGGC | SEQ ID |
| by TF | motif | | NO: 19 |
| regulatory control | ABRE binding site | (C/T)ACGTGGC | SEQ ID |
| by TF | motif | | NO: 20 |
| regulatory control | ABRE-like binding | (C/G/T)ACGTG(G/T)(A/C) | SEQ ID |
| by TF | site motif | | NO: 21 |
| regulatory control | ACE promoter motif | GACACGTAGA | SEQ ID |
| by TF | | | NO: 22 |
| regulatory control | AG binding site | TT(A/G/T)CC(A/T)(A/T)(A/T)(A/T)(A/T)(A/T)GG(A/C/T) | SEQ ID |
| by TF | motif | | NO: 23 |
| regulatory control | AG binding site in | CCATTTTTAGT | SEQ ID |
| by TF | AP3 | | NO: 24 |
| regulatory control | AG binding site in | CCATTTTTGG | SEQ ID |
| by TF | SUP | | NO: 25 |
| regulatory control | AGLI binding site | NTT(A/G/T)CC(A/T)(A/T)(A/T)(A/T)NNGG(A/T)AAN | SEQ ID |
| by TF | motif | | NO: 26 |
| regulatory control | AGL2 binding site | NN(A/T)NCCA(A/T)(A/T)(A/T)(A/T)T(A/G)G(A/T)(A/T)AN | SEQ ID |
| by TF | motif | | NO: 27 |
| regulatory control | AGL3 binding site | TT(A/T)C(C/T)A(A/T)(A/T)(A/T)(A/T)T(A/G)G(A/T)AA | SEQ ID |
| by TF | motif | | NO: 28 |
| regulatory control | AP1 binding site in | CCATTTTTAG | SEQ ID |
| by TF | AP3 | | NO: 29 |
| regulatory control | AP1 binding site in | CCATTTTTGG | SEQ ID |
| by TF | SUP | | NO: 30 |
| regulatory control | ARF binding site | TGTCTC | SEQ ID |
| by TF | motif | | NO: 31 |
| regulatory control | ARF1 binding site | TGTCTC | SEQ ID |
| by TF | motif | | NO: 32 |
| regulatory control | ATHB1 binding site | CAAT(A/T)ATTG | SEQ ID |
| by TF | motif | | NO: 33 |
| regulatory control | ATHB2 binding site | CAAT(C/G)ATTG | SEQ ID |
| by TF | motif | | NO: 34 |
| regulatory control | ATHB5 binding site | CAATNATTG | SEQ ID |
| by TF | motif | | NO: 35 |
| regulatory control | ATHB6 binding site | CAATTATTA | SEQ ID |
| by TF | motif | | NO: 36 |
| regulatory control | AtMYB2 binding | CTAACCA | SEQ ID |
| by TF | site in RD22 | | NO: 37 |
| regulatory control | AtMYC2 binding | CACATG | SEQ ID |
| by TF | site in RD22 | | NO: 38 |
| regulatory control | Box II promoter | GGTTAA | SEQ ID |
| by TF | motif | | NO: 39 |
| regulatory control | CArG promoter | CC(A/T)(A/T)(A/T)(A/T)(A/T)(A/T)GG | SEQ ID |
| by TF | motif | | NO: 40 |
| regulatory control | CArG1 motif in AP3 | GTTTACATAAATGGAAAA | SEQ ID |
| by TF | | | NO: 41 |
| regulatory control | CArG2 motif in AP3 | CTTACCTTTCATGGATTA | SEQ ID |
| by TF | | | NO: 42 |
| regulatory control | CArG3 motif in AP3 | CTTTCCATTTTTAGTAAC | SEQ ID |
| by TF | | | NO: 43 |
| regulatory control | CBF1 binding site in | TGGCCGAC | SEQ ID |
| by TF | cor15a | | NO: 44 |
| regulatory control | CBF2 binding site | CCACGTGG | SEQ ID |
| by TF | motif | | NO: 45 |
| regulatory control | CCA1 binding site | AA(A/C)AATCT | SEQ ID |
| by TF | motif | | NO: 46 |
| regulatory control | CCA1 motif1 | AAACAATCTA | SEQ ID |
| by TF | binding site in CAB1 | | NO: 47 |
| regulatory control | CCA1 motif2 | AAAAAAAATCTATGA | SEQ ID |
| by TF | binding site in CAB1 | | NO: 48 |
| regulatory control | DPBF1&2 binding | ACACNNG | SEQ ID |
| by TF | site motif | | NO: 49 |
| regulatory control | DRE promoter motif | TACCGACAT | SEQ ID |
| by TF | | | NO: 50 |
| regulatory control | DREB 1&2 binding | TACCGACAT | SEQ ID |
| by TF | site in rd29a | | NO: 51 |
| regulatory control | DRE-like promoter | (A/G/T)(A/G)CCGACN(A/T) | SEQ ID |
| by TF | motif | | NO: 52 |
| regulatory control | E2F binding site | TTTCCCGC | SEQ ID |
| by TF | motif | | NO: 53 |
| regulatory control | E2F/DP binding site | TTTCCCGC | SEQ ID |
| by TF | in AtCDC6 | | NO: 54 |
| regulatory control | E2F-varient binding | TCTCCCGCC | SEQ ID |
| by TF | site motif | | NO: 55 |
| regulatory control | EIL1 binding site in | TTCAAGGGGGCATGTATCTTGAA | SEQ ID |
| by TF | ERF1 | | NO: 56 |
| regulatory control | EIL2 binding site in | TTCAAGGGGGCATGTATCTTGAA | SEQ ID |
| by TF | ERF1 | | NO: 57 |
| regulatory control | EIL3 binding site in | TTCAAGGGGGCATGTATCTTGAA | SEQ ID |
| by TF | ERF1 | | NO: 58 |
| regulatory control | EIN3 binding site in | GGATTCAAGGGGGCATGTATCTTGAATCC | SEQ ID |
| by TF | ERF1 | | NO: 59 |
| regulatory control | ERE promoter motif | TAAGAGCCGCC | SEQ ID |
| by TF | | | NO: 60 |
| regulatory control | ERF1 binding site in | GCCGCC | SEQ ID |
| by TF | AtCHI-B | | NO: 61 |
| regulatory control | EveningElement | AAAATATCT | SEQ ID |
| by TF | promoter motif | | NO: 62 |
| regulatory control | GATA promoter | (A/T)GATA(G/A) | SEQ ID |
| by TF | motif | | NO: 63 |
| regulatory control | GBF1/2/3 binding | CCACGTGG | SEQ ID |
| by TF | site in ADH1 | | NO: 64 |
| regulatory control | G-box promoter | CACGTG | SEQ ID |
| by TF | motif | | NO: 65 |
| regulatory control | GCC-box promoter | GCCGCC | SEQ ID |
| by TF | motif | | NO: 66 |
| regulatory control | GT promoter motif | TGTGTGGTTAATATG | SEQ ID |
| by TF | | | NO: 67 |
| regulatory control | Hexamer promoter | CCGTCG | SEQ ID |
| by TF | motif | | NO: 68 |
| regulatory control | HSEs binding site | AGAANNTTCT | SEQ ID |
| by TF | motif | | NO: 69 |
| regulatory control | Ibox promoter motif | GATAAG | SEQ ID |
| by TF | | | NO: 70 |
| regulatory control | JASE1 motif in | CGTCAATGAA | SEQ ID |
| by TF | OPR1 | | NO: 71 |
| regulatory control | JASE2 motif in | CATACGTCGTCAA | SEQ ID |
| by TF | OPR2 | | NO: 72 |
| regulatory control | L1-box promoter | TAAATG(C/T)A | SEQ ID |
| by TF | motif | | NO: 73 |
| regulatory control | LS5 promoter motif | ACGTCATAGA | SEQ ID |
| by TF | | | NO: 74 |
| regulatory control | LS7 promoter motif | TCTACGTCAC | SEQ ID |
| by TF | | | NO: 75 |
| regulatory control | LTRE promoter | ACCGACA | SEQ ID |
| by TF | motif | | NO: 76 |
| regulatory control | MRE motif in CHS | TCTAACCTACCA | SEQ ID |
| by TF | | | NO: 77 |
| regulatory control | MYB binding site | (A/C)ACC(A/T)A(A/C)C | SEQ ID |
| by TF | promoter | | NO: 78 |
| regulatory control | MYB1 binding site | (A/C)TCC(A/T)ACC | SEQ ID |
| by TF | motif | | NO: 79 |
| regulatory control | MYB2 binding site | TAACT(G/C)GTT | SEQ ID |
| by TF | motif | | NO: 80 |
| regulatory control | MYB3 binding site | TAACTAAC | SEQ ID |
| by TF | motif | | NO: 81 |
| regulatory control | MYB4 binding site | A(A/C)C(A/T)A(A/C)C | SEQ ID |
| by TF | motif | | NO: 82 |
| regulatory control | Nonamer promoter | AGATCGACG | SEQ ID |
| by TF | motif | | NO: 83 |
| regulatory control | OBF4, 5 binding site | ATCTTATGTCATTGATGACGACCTCC | SEQ ID |
| by TF | in GST6 | | NO: 84 |
| regulatory control | OBP-1, 4, 5 binding | TACACTTTTGG | SEQ ID |
| by TF | site in GST6 | | NO: 85 |
| regulatory control | OCS promoter motif | TGACG(C/T)AAG(C/G)(A/G)(A/C)T(G/T)ACG(C/T)(A/C)(A/C) | SEQ ID |
| by TF | | | NO: 86 |
| regulatory control | octamer promoter | CGCGGATC | SEQ ID |
| by TF | motif | | NO: 87 |
| regulatory control | PI promoter motif | GTGATCAC | SEQ ID |
| by TF | | | NO: 88 |
| regulatory control | PII promoter motif | TTGGTTTTGATCAAAACCAA | SEQ ID |
| by TF | | | NO: 89 |
| regulatory control | PRHA binding site in | TAATTGACTCAATTA | SEQ ID |
| by TF | PAL1 | | NO: 90 |
| regulatory control | RAV1-A binding site | CAACA | SEQ ID |
| by TF | motif | | NO: 91 |
| regulatory control | RAV1-B binding site | CACCTG | SEQ ID |
| by TF | motif | | NO: 92 |
| regulatory control | RY-repeat promoter | CATGCATG | SEQ ID |
| by TF | motif | | NO: 93 |
| regulatory control | SBP-box promoter | TNCGTACAA | SEQ ID |
| by TF | motif | | NO: 94 |
| regulatory control | T-box promoter | ACTTTG | SEQ ID |
| by TF | motif | | NO: 95 |
| regulatory control | TEF-box promoter | AGGGGCATAATGGTAA | SEQ ID |
| by TF | motif | | NO: 96 |
| regulatory control | TELO-box promoter | AAACCCTAA | SEQ ID |
| by TF | motif | | NO: 97 |
| regulatory control | TGA1 binding site | TGACGTGG | SEQ ID |
| by TF | motif | | NO: 98 |
| regulatory control | W-box promoter | TTGAC | SEQ ID |
| by TF | motif | | NO: 99 |
| regulatory control | Z-box promoter | ATACGTGT | SEQ ID |
| by TF | motif | | NO: 100 |
| regulatory control | AG binding site in | AAAACAGAATAGGAAA | SEQ ID |
| by TF | SPL/NOZ | | NO: 101 |
| regulatory control | Bellringer/ | AAATTAAA | SEQ ID |
| by TF | replumless/ | | NO: 102 |
| | pennywise binding | | |
| | site IN AG | | |
| regulatory control | Bellringer/ | AAATTAGT | SEQ ID |
| by TF | replumless/ | | NO: 103 |
| | pennywise binding | | |
| | site 2 in AG | | |
| regulatory control | Bellringer/ | ACTAATTT | SEQ ID |
| by TF | replumless/ | | NO: 104 |
| | pennywise binding | | |
| | site 3 in AG | | |
| regulatory control | AGL15 binding site | CCAATTTAATGG | SEQ ID |
| by TF | in AtGA2ox6 | | NO: 105 |
| regulatory control | ATB2/AtbZIP53/ | ACTCAT | SEQ ID |
| by TF | AtbZIP44/GBF5 | | NO: 106 |
| | binding site | | |
| | in ProDH | | |
| regulatory control | LFY binding site in | CTTAAACCCTAGGGGTAAT | SEQ ID |
| by TF | AP3 | | NO: 107 |
| regulatory control | SORLREP1 | TT(A/T)TACTAGT | SEQ ID |
| by TF | | | NO: 108 |
| regulatory control | SORLREP2 | ATAAAACGT | SEQ ID |
| by TF | | | NO: 109 |
| regulatory control | SORLREP3 | TGTATATAT | SEQ ID |
| by TF | | | NO: 110 |
| regulatory control | SORLREP4 | CTCCTAATT | SEQ ID |
| by TF | | | NO: 111 |
| regulatory control | SORLREP5 | TTGCATGACT | SEQ ID |
| by TF | | | NO: 112 |
| regulatory control | SORLIP1 | AGCCAC | SEQ ID |
| by TF | | | NO: 113 |
| regulatory control | SORLIP2 | GGGCC | SEQ ID |
| by TF | | | NO: 114 |
| regulatory control | SORLIP3 | CTCAAGTGA | SEQ ID |
| by TF | | | NO: 115 |
| regulatory control | SORLIP4 | GTATGATGG | SEQ ID |
| by TF | | | NO: 116 |
| regulatory control | SORLIP5 | GAGTGAG | SEQ ID |
| by TF | | | NO: 117 |
| regulatory control | ABFs binding site | CACGTGGC | SEQ ID |
| by TF | motif | | NO: 118 |
| down | NdeI restriction site | GTTTAATTGAGTTGTCATATGTTAATAACGGTAT | SEQ ID |
| | | | NO: 119 |
| down | NdeI restriction site | ATACCGTTATTAACATATGACAACTCAATTAAAC | SEQ ID |
| | | | NO: 120 |
| up (auxin | 3 × DR5 auxin- | CCGACAAAAGGCCGACAAAAGGCCGACAAAAGGT | SEQ ID |
| responsive) | response element | | NO: 121 |
| up (auxin | 3 × DR5 auxin- | ACCTTTTGTCGGCCTTTTGTCGGCCTTTTGTCGG | SEQ ID |
| responsive) | response element | | NO: 122 |
| up (auxin | 6 × DR5 auxin- | GCCGACAAAAGGCCGACAAAAGGCCGACAAAAGGCCGACAAAAGGCCGACA | SEQ ID |
| responsive) | responsive element | AAAGGCCGACAAAAGGT | NO: 123 |
| up (auxin | 6 × DR5 auxin- | ACCTTTTGTCGGCCTTTTGTCGGCCTTTTGTCGGCCTTTTGTCGGCCTTTT | SEQ ID |
| responsive) | responsive element | GTCGGCCTTTTGTCGGC | NO: 124 |
| up (auxin | 9 × DR5 auxin- | CCGACAAAAGGCCGACAAAAGGCCGACAAAAGGCCGACAAAAGGCCGACAA | SEQ ID |
| responsive) | responsive element | AAGGCCGACAAAAGGCCGACAAAAGGCCGACAAAAGGCCGACAAAAGGT | NO: 125 |
| up (auxin | 9 × DR5 auxin- | ACCTTTTGTCGGCCTTTTGTCGGCCTTTTGTCGGCCTTTTGTCGGCCTTTT | SEQ ID |
| responsive) | responsive element | GTCGGCCTTTTGTCGGCCTTTTGTCGGCCTTTTGTCGGCCTTTTGTCGG | NO: 126 |
| Cre recombinase | LoxP (wild-type 1) | ATAACTTCGTATAGCATACATTATACGAAGTTAT | SEQ ID |
| recognition site | | | NO: 127 |
| Cre recombinase | LoxP (wild-type 2) | ATAACTTCGTATAATGTATGCTATACGAAGTTAT | SEQ ID |
| recognition site | | | NO: 128 |
| Cre recombinase | Canonical LoxP | ATAACTTCGTATANNNTANNNTATACGAAGTTAT | SEQ ID |
| recognition site | | | NO: 129 |
| Cre recombinase | Lox 511 | ATAACTTCGTATAATGTATaCTATACGAAGTTAT | SEQ ID |
| recognition site | | | NO: 130 |
| Cre recombinase | Lox 5171 | ATAACTTCGTATAATGTgTaCTATACGAAGTTAT | SEQ ID |
| recognition site | | | NO: 131 |
| Cre recombinase | Lox 2272 | ATAACTTCGTATAAaGTATcCTATACGAAGTTAT | SEQ ID |
| recognition site | | | NO: 132 |
| Cre recombinase | M2 | ATAACTTCGTATAAgaaAccaTATACGAAGTTAT | SEQ ID |
| recognition site | | | NO: 133 |
| Cre recombinase | M3 | ATAACTTCGTATAtaaTACCATATACGAAGTTAT | SEQ ID |
| recognition site | | | NO: 134 |
| Cre recombinase | M7 | ATAACTTCGTATAAgaTAGAATATACGAAGTTAT | SEQ ID |
| recognition site | | | NO: 135 |
| Cre recombinase | M11 | ATAACTTCGTATAaGATAgaaTATACGAAGTTAT | SEQ ID |
| recognition site | | | NO: 136 |
| Cre recombinase | Lox 71 | taccgTTCGTATANNNTANNNTATACGAAGTTAT | SEQ ID |
| recognition site | | | NO: 137 |
| Cre recombinase | Lox 66 | ATAACTTCGTATANNNTANNNTATACGAAcggta | SEQ ID |
| recognition site | | | NO: 138 |
| maize ovule/early | miR156j recognition | GTGCTCTCTCTCTTCTGTCA | SEQ ID |
| kernel transcript | site | | NO: 139 |
| down-regulation | | | |
| maize ovule/early | miR156j recognition | CTGCTCTCTCTCTTCTGTCA | SEQ ID |
| kernel transcript | site | | NO: 140 |
| down-regulation | | | |
| maize ovule/early | miR156j recognition | TTGCTTACTCTCTTCTGTCA | SEQ ID |
| kernel transcript | site | | NO: 141 |
| down-regulation | | | |
| maize ovule/early | miR156j recognition | CCGCTCTCTCTCTTCTGTCA | SEQ ID |
| kernel transcript | site | | NO: 142 |
| down-regulation | | | |
| maize ovule/early | miR159c recognition | TGGAGCTCCCTTCATTCCAAT | SEQ ID |
| kernel transcript | site | | NO: 143 |
| down-regulation | | | |
| maize ovule/early | miR159c recognition | TCGAGTTCCCTTCATTCCAAT | SEQ ID |
| kernel transcript | site | | NO: 144 |
| down-regulation | | | |
| maize ovule/early | miR159c recognition | ATGAGCTCTCTTCAAACCAAA | SEQ ID |
| kernel transcript | site | | NO: 145 |
| down-regulation | | | |
| maize ovule/early | miR159c recognition | TGGAGCTCCCTTCATTCCAAG | SEQ ID |
| kernel transcript | site | | NO: 146 |
| down-regulation | | | |
| maize ovule/early | miR159c recognition | TAGAGCTTCCTTCAAACCAAA | SEQ ID |
| kernel transcript | site | | NO: 147 |
| down-regulation | | | |
| maize ovule/early | miR159c recognition | TGGAGCTCCATTCGATCCAAA | SEQ ID |
| kernel transcript | site | | NO: 148 |
| down-regulation | | | |
| maize ovule/early | miR159c recognition | AGCAGCTCCCTTCAAACCAAA | SEQ ID |
| kernel transcript | site | | NO: 149 |
| down-regulation | | | |
| maize ovule/early | miR159c recognition | CAGAGCTCCCTTCACTCCAAT | SEQ ID |
| kernel transcript | site | | NO: 150 |
| down-regulation | | | |
| maize ovule/early | miR159c recognition | TGGAGCTCCCTTCACTCCAAT | SEQ ID |
| kernel transcript | site | | NO: 151 |
| down-regulation | | | |
| maize ovule/early | miR159c recognition | TGGAGCTCCCTTCACTCCAAG | SEQ ID |
| kernel transcript | site | | NO: 152 |
| down-regulation | | | |
| maize ovule/early | miR159c recognition | TGGAGCTCCCTTTAATCCAAT | SEQ ID |
| kernel transcript | site | | NO: 153 |
| down-regulation | | | |
| maize embryo | miR166b recognition | TTGGGATGAAGCCTGGTCCGG | SEQ ID |
| transcript down- | site | | NO: 154 |
| regulation | | | |
| maize embryo | miR166b recognition | CTGGGATGAAGCCTGGTCCGG | SEQ ID |
| transcript down- | site | | NO: 155 |
| regulation | | | |
| maize embryo | miR166b recognition | CTGGAATGAAGCCTGGTCCGG | SEQ ID |
| transcript down- | site | | NO: 156 |
| regulation | | | |
| maize embryo | miR166b recognition | CGGGATGAAGCCTGGTCCGG | SEQ ID |
| transcript down- | site | | NO: 157 |
| regulation | | | |
| maize endosperm | miR167g recognition | GAGATCAGGCTGGCAGCTTGT | SEQ ID |
| transcript down- | site | | NO: 158 |
| regulation | | | |
| maize endosperm | miR167g recognition | TAGATCAGGCTGGCAGCTTGT | SEQ ID |
| transcript down- | site | | NO: 159 |
| regulation | | | |
| maize endosperm | miR167g recognition | AAGATCAGGCTGGCAGCTTGT | SEQ ID |
| transcript down- | site | | NO: 160 |
| regulation | | | |
| maize pollen | miR156i recognition | GTGCTCTCTCTCTTCTGTCA | SEQ ID |
| transcript down- | site | | NO: 161 |
| regulation | | | |
| maize pollen | miR156i recognition | CTGCTCTCTCTCTTCTGTCA | SEQ ID |
| transcript down- | site | | NO: 162 |
| regulation | | | |
| maize pollen | miR156i recognition | TTGCTTACTCTCTTCTGTCA | SEQ ID |
| transcript down- | site | | NO: 163 |
| regulation | | | |
| maize pollen | miR156i recognition | CCGCTCTCTCTCTTCTGTCA | SEQ ID |
| transcript down- | site | | NO: 164 |
| regulation | | | |
| maize pollen | mir160b-like | TGGCATGCAGGGAGCCAGGCA | SEQ ID |
| transcript down- | recognition site | | NO: 165 |
| regulation | | | |
| maize pollen | mir160b-like | AGGAATACAGGGAGCCAGGCA | SEQ ID |
| transcript down- | recognition site | | NO: 166 |
| regulation | | | |
| maize pollen | mir160b-like | GGGTTTACAGGGAGCCAGGCA | SEQ ID |
| transcript down- | recognition site | | NO: 167 |
| regulation | | | |
| maize pollen | mir160b-like | AGGCATACAGGGAGCCAGGCA | SEQ ID |
| transcript down- | recognition site | | NO: 168 |
| regulation | | | |
| maize pollen | miR393a recognition | AAACAATGCGATCCCTTTGGA | SEQ ID |
| transcript down- | site | | NO: 169 |
| regulation | | | |
| maize pollen | miR393a recognition | AGACCATGCGATCCCTTTGGA | SEQ ID |
| transcript down- | site | | NO: 170 |
| regulation | | | |
| maize pollen | miR393a recognition | GGTCAGAGCGATCCCTTTGGC | SEQ ID |
| transcript down- | site | | NO: 171 |
| regulation | | | |
| maize pollen | miR393a recognition | AGACAATGCGATCCCTTTGGA | SEQ ID |
| transcript down- | site | | NO: 172 |
| regulation | | | |
| maize pollen | miR396a recognition | TCGTTCAAGAAAGCCTGTGGAA | SEQ ID |
| transcript down- | site | | NO: 173 |
| regulation | | | |
| maize pollen | miR396a recognition | CGTTCAAGAAAGCCTGTGGAA | SEQ ID |
| transcript down- | site | | NO: 174 |
| regulation | | | |
| maize pollen | miR396a recognition | TCGTTCAAGAAAGCATGTGGAA | SEQ ID |
| transcript down- | site | | NO: 175 |
| regulation | | | |
| maize pollen | miR396a recognition | ACGTTCAAGAAAGCTTGTGGAA | SEQ ID |
| transcript down- | site | | NO: 176 |
| regulation | | | |
| maize pollen | miR396a recognition | CGTTCAAGAAAGCCTGTGGAA | SEQ ID |
| transcript down- | site | | NO: 177 |
| regulation | | | |
| maize male tissue | male tissue-specific | GGACAACAAGCACCTTCTTGCCTTGCAAGGCCTCCCTTCCCTATGGTAGCCACT | SEQ ID |
| transcript down- | siRNA element | TGAGTGGATGACTTCACCTTAAAGCTATTGATTCCCTAAGTGCCAGACATAATA | NO: 178 |
| regulation | | GGCTATACATTCTCTCTGGTGGCAACAATGAGCCATTTTGGTTGGTGTGGTAGT | |
| | | CTATTATTGAGTTTTTTTTGGCACCGTACTCCCATGGAGAGTAGAAGACAAACT | |
| | | CTTCACCGTTGTAGTCGTTGATGGTATTGGTGGTGACGACATCCTTGGTGTGCA | |
| | | TGCACTGGTGAGTCACTGTTGTACTCGGCG | |
| maize male tissue | male tissue-specific | GGACAACAAGCACCTTCTTGCCTTGCAAGGCCTCCCTTCCCTATGGTAGCCACT | SEQ ID |
| transcript down- | siRNA element | TGAGTGGATGACTTCACCTTAAAGCTATCGATTCCCTAAGTGCCAGACAT | NO: 179 |
| regulation | | | |
| maize male tissue | male tissue-specific | CTCTTCACCGTTGTAGTCGTTGATGGTATTGGTGGTGACGACATCCTTGGTGTG | SEQ ID |
| transcript down- | siRNA element | CATGCACTGGTGAGTCACTGTTGTAC | NO: 180 |
| regulation | | | |
| maize male tissue | male tissue-specific | GGACAACAAGCACCTTCTTGCCTTGCAAGGCCTCCCTTCCCTATGGTAGCCACT | SEQ ID |
| transcript down- | siRNA element | TGAGTGGATGACTTCACCTTAAAGCTATCGATTCCCTAAGTGCCAGACATCTCT | NO: 181 |
| regulation | | TCACCGTTGTAGTCGTTGATGGTATTGGTGGTGACGACATCCTTGGTGTGCATG | |
| | | CACTGGTGAGTCACTGTTGTAC | |
| maize male tissue | male tissue-specific | CTCTTCACCGTTGTAGTCGTTGATGGTATTGGTGGTGACGACATCCTTGGTGTG | SEQ ID |
| transcript down- | siRNA element | CATGCACTGGTGAGTCACTGTTGTACGGACAACAAGCACCTTCTTGCCTTGCAA | NO: 182 |
| regulation | | GGCCTCCCTTCCCTATGGTAGCCACTTGAGTGGATGACTTCACCTTAAAGCTAT | |
| | | CGATTCCCTAAGTGCCAGACAT | |
| up (auxin | ocs enhancer | ACGTAAGCGCTTACGT | SEQ ID |
| reponsive; | (Agrobacterium sp.) | | NO: 183 |
| constitutive) | | | |
| up (auxin | 12-nt ocs orthologue | GTAAGCGCTTAC | SEQ ID |
| reponsive; | (Zea mays) | | NO: 184 |
| constitutive) | | | |
| up (nitrogen | AtNRE | AAGAGATGAGCTCTTGAGCAATGTAAAGGGTCAAGTTGTTTCT | SEQ ID |
| responsive) | | | NO: 185 |
| up (nitrogen | AtNRE | AGAAACAACTTGACCCTTTACATTGCTCAAGAGCTCATCTCTT | SEQ ID |
| responsive) | | | NO: 186 |
| up (auxin | 3 × DR5 auxin- | ACCUUUUGUCGGCCUUUUGUCGGCCUUUUGUCGG | SEQ ID |
| responsive) | response element; | | NO: 187 |
| | RNA strand of | | |
| | RNA/DNA hybid | | |
| up (auxin | 3 × DR5 auxin- | TCGGTCCGACAAAAGGCCGACAAAAGGCGGACAAAAGG | SEQ ID |
| responsive) | response element; | | NO: 188 |
| | sticky-ended | | |
| up (auxin | 3 × DR5 auxin- | ACCGACCTTTTGTCGGCCTTTTGTCGGCCTTTTGTCGG | SEQ ID |
| responsive) | response element; | | NO: 189 |
| | sticky-ended | | |
| down or up | OsTBF1 uORF2 | ATGGGAGTAGAGGCGGGCGGCGGCTGCGGTGGGAGGGCGGTAGTCACCGGAT | SEQ ID |
| (MAMP- | | TCTACGTCTGGGGCTGGGAGTTCCTCACCGCCCTCCTGCTCTTCTCGGCCACCA | NO: 190 |
| responsive) | | CCTCCTACTAG | |
| down or up | synthetic R-motif | AAAAAAAAAAAAAAA | SEQ ID |
| (MAMP- | | | NO: 191 |
| responsive) | | | |
| down or up | AtTBF1 R-motif | CACATACACACAAAAATAAAAAAGA | SEQ ID |
| (MAMP- | | | NO: 192 |
| responsive) | | | |
| decreases | insulator | GAATATATATATATTC | SEQ ID |
| upregulation | | | NO: 193 |
| sequence | ZmEPSPS exon 1 | GTGAACAACCTTATGAAATTTGGGCGCATAACTTCGTATAGCATACATTATACG | SEQ ID |
| modification | with two point | AAGTTATAAAGAACTCGCCCTCAAGGGTTGATCTTATGCCATCGTCATGATAA | NO: 194 |
| | mutations and | ACAGTGGAGCACGGACGATCCTTTACGTTGTTTTTAACAAACTTTGTCAGAAAA | |
| | heterospecific lox | CTAGCATCATTAACTTCTTAATGACGATTTCACAACAAAAAAAGGTAACCTCG | |
| | sites | CTACTAACATAACAAAATACTTGTTGCTTATTAATTATATGTTTTTTAATCTTT | |
| | | GATCAGGGGACAACAGTGGTTGATAACCTGTTGAACAGTGAGGATGTCCACTAC | |
| | | ATGCTCGGGGCCTTGAGGACTCTTGGTCTCTCTGTCGAAGCGGACAAAGCTGC | |
| | | CAAAAGAGCTGTAGTTGTTGGCTGTGGTGGAAAGTTCCCAGTTGAGGATTCTA | |
| | | AAGAGGAAGTGCAGCTCTTCTTGGGGAATGCTGGAATTGCAATGCGGGCATTG | |
| | | ACAGCAGCTGTTACTGCTGCTGGTGGAAATGCAACGTATGTTTCCTCTCTTTCT | |
| | | CTCTACAATACTTGCATAACTTCGTATAAAGTATCCTATACGAAGTTATTGGAG | |
| | | TTAGTATGAAACCCATGGGTATGTCTAGT | |
| decreases | miniature inverted- | TACTCCCTCCGTTTCTTTTTATTAGTCGCTGGATAGTGCAATTTTGCACTATC | SEQ ID |
| upregulation | repeat transposable | CAGCGACTAATAAAAAGAAACGGAGGGAGTA | NO: 195 |
| | element (“MITE”) | | |
| decreases | miniature inverted- | TACTCCCTCCGTTTCTTTTTATTAGTCGCTGGATAGTGCAAAATTGCACTAT | SEQ ID |
| upregulation | repeat transposable | CCAGCGACTAATAAAAAGAAACGGAGGGAGTA | NO: 196 |
| | element (“MITE”) | | |
| up (constitutive) | G-box | ACACGTGACACGTGACACGTGACACGTG | SEQ ID |
| | | | NO: 197 |
| decreased | mRNA destabilizing | TTATTTATTTTATTTATTTTATTTATTTTATTTATT | SEQ ID |
| transcript | element | | NO: 198 |
| stability | (mammalian) | | |
| decreased | mRNA destabilizing | AATTTTAATTTTAATTTTAATTTTAATTTTAATTTT | SEQ ID |
| transcript | element (Arabidopsis | | NO: 199 |
| stability | thaliana) | | |
| increased | mRNA stabilizing | TCTCTTTCTCTTTCTCTTTCTCTTTCTCTTTCTCTT | SEQ ID |
| transcript | element | | NO: 200 |
| stability | | | |
| down | SHAT1-repressor | ATTAAAAAAATAAATAAGATATTATTAAAAAAATAAATAAGATATTATTAAAA | SEQ ID |
| | | AAATAAATAAGATATTATTAAAAAAATAAATAAGATATT | NO: 201 |
| decreased | SAUR mRNA | AGATCTAGGAGACTGACATAGATTGGAGGAGACATTTTGTATAATAAGATCTA | SEQ ID |
| transcript | destabilizing | GGAGACTGACATAGATTGGAGGAGACATTTTGTATAATA | NO: 202 |
| stability | element | | |
| down by recruiting | CTCC | CTCC(T/A/G)CC(G/T/A) | SEQ ID |
| transcription | | | NO: 203 |
| factors interacting | | | |
| with PRC2 | | | |
| down by recruiting | CCG | (C/T/A)(G/T)C(C/A)(G/A)(C/A)C(G/T)(C/A) | SEQ ID |
| transcription | | | NO: 204 |
| factors interacting | | | |
| with PRC2 | | | |
| down by recruiting | G-box | (C/G)ACGTGGNN(G/A/C)(T/A) | SEQ ID |
| transcription | | | NO: 205 |
| factors interacting | | | |
| with PRC2 | | | |
| down by recruiting | GA repeat | A(G/A)A(G/A)AGA(G/A)(A/G) | SEQ ID |
| transcription | | | NO: 206 |
| factors interacting | | | |
| with PRC2 | | | |
| down by recruiting | AC-rich | CA(A/T/C)CA(C/A)CA(A/C/T) | SEQ ID |
| transcription | | | NO: 207 |
| factors interacting | | | |
| with PRC2 | | | |
| down by recruiting | Telobox | (A/G)AACCC(T/A)A(A/G) | SEQ ID |
| transcription | | | NO: 208 |
| factors interacting | | | |
| with PRC2 | | | |
| up (Pi starvation | PIBS | GNATATNC | SEQ ID |
| response) | | | NO: 209 |
| Up | OCS | GTAAGCGCTTAC | SEQ ID |
| | | | NO: 210 |
| Up | Gbox | GCCACGTGCCGCCACGTGCCGCCACGTGCCGCCACGTGCC | SEQ ID |
| | | | NO: 211 |
| Up | Green tissue- | AAAATATTTATAAAATATTTATAAAATATTTATAAAATATTTAT | SEQ ID |
| | specific | | NO: 212 |
| | promoter (GSP) | | |
| Up | E2F binding site | CCCGCCAAACCCGCCAAACCCGCCAAACCCGCCAAA | SEQ ID |
| | | | NO: 213 |
| Down | mRNA destablizing | AATTTTAATTTTAATTTTAATTTTAATTTTAATTTT | SEQ ID |
| | element | | NO: 214 |
| Down | Silencer | GAATATATATATATTC | SEQ ID |
| | | | NO: 215 |

TABLE 10

| | | | Gene | Expression | Gene | Protein |
|---|---|---|---|---|---|---|
| Trait | Gene(s) | Gene ID | Product | Change | SEQ ID | SEQ ID |
| Abiotic stress | DREB1-like | 547622 | Protein | Increase | SEQ ID NO: 235 | SEQ ID NO: 456 |
| Abiotic stress | DREB1 | 547642 | Protein | Increase | SEQ ID NO: 236 | SEQ ID NO: 457 |
| Abiotic stress | NRP-A | 547685 | Protein | Increase | SEQ ID NO: 237 | SEQ ID NO: 458 |
| Abiotic stress | PAP3 | 547708 | Protein | Increase | SEQ ID NO: 238 | SEQ ID NO: 459 |
| Abiotic stress | VSP25 | 547821 | Protein | Increase | SEQ ID NO: 239 | SEQ ID NO: 460 |
| Abiotic stress | MP2 | 547827 | Protein | Increase | SEQ ID NO: 240 | SEQ ID NO: 461 |
| Abiotic stress | BIP | 547839 | Protein | Increase | SEQ ID NO: 241 | SEQ ID NO: 462 |
| Abiotic stress | PPCK3 | 548089 | Protein | Increase | SEQ ID NO: 242 | SEQ ID NO: 463 |
| Abiotic stress | IFS2 | 606705 | Protein | Increase | SEQ ID NO: 243 | SEQ ID NO: 464 |
| Abiotic Stress | NAC81 | 732555 | Protein | Decrease | SEQ ID NO: 244 | SEQ ID NO: 465 |
| Abiotic stress | DREB2 | 732579 | Protein | Increase | SEQ ID NO: 245 | SEQ ID NO: 466 |
| Abiotic stress | LOC732608 | 732608 | Protein | Increase | SEQ ID NO: 246 | SEQ ID NO: 467 |
| Abiotic stress | LOC732656 | 732656 | Protein | Increase | SEQ ID NO: 247 | SEQ ID NO: 468 |
| Abiotic stress | LOC778160 | 778160 | Protein | Increase | SEQ ID NO: 248 | SEQ ID NO: 469 |
| Abiotic stress | BZIP132 | 778192 | Protein | Increase | SEQ ID NO: 249 | SEQ ID NO: 470 |
| Abiotic stress | GMWRKY46 | 100127375 | Protein | Increase | SEQ ID NO: 250 | SEQ ID NO: 471 |
| Abiotic stress | OSBP | 100137077 | Protein | Increase | SEQ ID NO: 251 | SEQ ID NO: 472 |
| Abiotic stress | GT-2B | 100137081 | Protein | Increase | SEQ ID NO: 252 | SEQ ID NO: 473 |
| Abiotic stress | NAC19 | 100170713 | Protein | Increase | SEQ ID NO: 253 | SEQ ID NO: 474 |
| Abiotic stress | LOC100170723 | 100170723 | Protein | Increase | SEQ ID NO: 254 | SEQ ID NO: 475 |
| Abiotic stress | GMRD22 | 100301893 | Protein | Increase | SEQ ID NO: 255 | SEQ ID NO: 476 |
| Abiotic stress | GSTU4 | 100527381 | Protein | Increase | SEQ ID NO: 256 | SEQ ID NO: 477 |
| Abiotic stress | LOC100776453 | 100776453 | Protein | Increase | SEQ ID NO: 257 | SEQ ID NO: 478 |
| Abiotic stress | LOC100779440 | 100779440 | Protein | Increase | SEQ ID NO: 258 | SEQ ID NO: 479 |
| Abiotic stress | GSK-3 | 100780226 | Protein | Increase | SEQ ID NO: 259 | SEQ ID NO: 480 |
| Abiotic stress | GMPIP1-6 | 100780356 | Protein | Increase | SEQ ID NO: 260 | SEQ ID NO: 481 |
| Abiotic stress | LOC100782841 | 100782841 | Protein | Increase | SEQ ID NO: 261 | SEQ ID NO: 482 |
| Abiotic stress | LOC100782841 | 100782841 | Protein | Increase | SEQ ID NO: 262 | SEQ ID NO: 483 |
| Abiotic stress | GMSIZ1B | 100793735 | Protein | Increase | SEQ ID NO: 263 | SEQ ID NO: 484 |
| Abiotic stress | LOC100794096 | 100794096 | Protein | Increase | SEQ ID NO: 264 | SEQ ID NO: 485 |
| Abiotic stress | GMPUB8 | 100795263 | Protein | Decrease | SEQ ID NO: 265 | SEQ ID NO: 486 |
| Abiotic Stress | GmRCAb | 100797222 | Protein | Change coding sequence | SEQ ID NO: 266 | SEQ ID NO: 487 |
| Abiotic stress | GMSIZ1A | 100797252 | Protein | Increase | SEQ ID NO: 267 | SEQ ID NO: 488 |
| Abiotic stress | AP2-7 | 100800134 | Protein | Increase | SEQ ID NO: 268 | SEQ ID NO: 489 |
| Abiotic stress | LOC100800453 | 100800453 | Protein | Increase | SEQ ID NO: 269 | SEQ ID NO: 490 |
| Abiotic stress | RFP1 | 100806337 | Protein | Increase | SEQ ID NO: 270 | SEQ ID NO: 491 |
| Abiotic Stress | GmPYL9 | 100810273 | Protein | Change coding sequence | SEQ ID NO: 271 | SEQ ID NO: 492 |
| Abiotic stress | LOC100812768 | 100812768 | Protein | Increase | SEQ ID NO: 272 | SEQ ID NO: 493 |
| Abiotic stress | LOC100819467 | 100819467 | Protein | Increase | SEQ ID NO: 273 | SEQ ID NO: 494 |
| Abiotic stress | GMHSF-34 | 100820298 | Protein | Increase | SEQ ID NO: 274 | SEQ ID NO: 495 |
| Abiotic stress | MIR172C | 100886233 | miRNA | Increase | SEQ ID NO: 275 | |
| Architecture | W1 | 547705 | Protein | Increase/Decrease | SEQ ID NO: 276 | SEQ ID NO: 497 |
| Architecture | ENOD55-2 | 547770 | Protein | Increase | SEQ ID NO: 277 | SEQ ID NO: 498 |
| Architecture | ENOD93 | 547773 | Protein | Increase | SEQ ID NO: 278 | SEQ ID NO: 499 |
| Architecture | CLV1B | 732625 | Protein | Decrease | SEQ ID NO: 279 | SEQ ID NO: 500 |
| Architecture | AKR1 | 100301897 | Protein | Decrease | SEQ ID NO: 280 | SEQ ID NO: 501 |
| Architecture | GMMFT | 100306314 | Protein | Increase/Decrease | SEQ ID NO: 281 | SEQ ID NO: 502 |
| Architecture | LOC100499629 | 100499629 | Protein | Increase/Decrease | SEQ ID NO: 282 | SEQ ID NO: 503 |
| Architecture | LOC100775555 | 100775555 | Protein | Increase | SEQ ID NO: 283 | SEQ ID NO: 504 |
| Architecture | Dt1 | 100776154 | Protein | Increase/Decrease | SEQ ID NO: 284 | SEQ ID NO: 505 |
| Architecture | GMFT3B | 100781509 | Protein | Increase/Decrease | SEQ ID NO: 285 | SEQ ID NO: 506 |
| Architecture | GS52 | 100781628 | Protein | Increase | SEQ ID NO: 286 | SEQ ID NO: 507 |
| Architecture | W2 | 100782308 | Protein | Increase/Decrease | SEQ ID NO: 287 | SEQ ID NO: 508 |
| Architecture | LOC100787444 | 100787444 | Protein | Decrease | SEQ ID NO: 288 | SEQ ID NO: 509 |
| Architecture | LOC100790763 | 100790763 | Protein | Increase/Decrease | SEQ ID NO: 289 | SEQ ID NO: 510 |
| Architecture | TFL1.1 | 100791809 | Protein | Decrease | SEQ ID NO: 290 | SEQ ID NO: 511 |
| Architecture | GMFT5A | 100796994 | Protein | Increase/Decrease | SEQ ID NO: 291 | SEQ ID NO: 512 |
| Architecture | GMFT3A | 100803909 | Protein | Increase/Decrease | SEQ ID NO: 292 | SEQ ID NO: 513 |
| Architecture | LOC100813937 | 100813937 | Protein | Decrease | SEQ ID NO: 293 | SEQ ID NO: 514 |
| Architecture | GMFT2A | 100814951 | Protein | Increase/Decrease | SEQ ID NO: 294 | SEQ ID NO: 515 |
| Architecture | LOC100818062 | 100818062 | Protein | Decrease | SEQ ID NO: 295 | SEQ ID NO: 516 |
| Architecture | LN | 102661548 | Protein | Increase/Decrease | SEQ ID NO: 296 | SEQ ID NO: 517 |
| Architecture | CLV3a | 102662349 | Protein | Decrease | SEQ ID NO: 297 | SEQ ID NO: 518 |
| Architecture | LOC102664687 | 102664687 | Protein | Increase/Decrease | SEQ ID NO: 298 | SEQ ID NO: 519 |
| Architecture | CLV3b | 102669448 | Protein | Decrease | SEQ ID NO: 299 | SEQ ID NO: 520 |
| Biotic stress | PDR12 | 547508 | Protein | Increase | SEQ ID NO: 300 | SEQ ID NO: 521 |
| Biotic stress | DREB1 | 547642 | Protein | Increase | SEQ ID NO: 301 | SEQ ID NO: 522 |
| Biotic stress | CYSTATIN | 547777 | Protein | Increase | SEQ ID NO: 302 | SEQ ID NO: 523 |
| Biotic stress | PRP | 547791 | Protein | Increase | SEQ ID NO: 303 | SEQ ID NO: 524 |
| Biotic stress | ACPD | 547808 | Protein | Decrease | SEQ ID NO: 304 | SEQ ID NO: 525 |
| Biotic stress | PGIP | 547838 | Protein | Increase | SEQ ID NO: 305 | SEQ ID NO: 526 |
| Biotic stress | L1 | 547875 | Protein | Increase | SEQ ID NO: 306 | SEQ ID NO: 527 |
| Biotic stress | LOC100818432 | 547983 | Protein | Increase | SEQ ID NO: 307 | SEQ ID NO: 528 |
| Biotic stress | MIPS | 548084 | Protein | Increase | SEQ ID NO: 308 | SEQ ID NO: 529 |
| Biotic stress | LOC100815291 | 732578 | Protein | Increase | SEQ ID NO: 309 | SEQ ID NO: 530 |
| Biotic stress | LOC100797842 | 3989271 | Protein | Increase | SEQ ID NO: 310 | |
| Biotic stress | N-36A | 3989355 | Protein | Decrease | SEQ ID NO: 311 | |
| Biotic stress | N2 | 15308528 | Protein | Increase | SEQ ID NO: 312 | |
| Biotic stress | LOC100797449 | 15308540 | Protein | Increase | SEQ ID NO: 313 | |
| Biotic stress | RHG1 | 100101892 | Protein | Increase | SEQ ID NO: 314 | SEQ ID NO: 535 |
| Biotic stress | G4DT | 100301896 | Protein | Increase | SEQ ID NO: 315 | SEQ ID NO: 536 |
| Biotic stress | PGIP4 | 100305373 | Protein | Increase | SEQ ID NO: 316 | SEQ ID NO: 537 |
| Biotic stress | RLK3 | 100499747 | Protein | Increase | SEQ ID NO: 317 | SEQ ID NO: 538 |
| Biotic stress | rps1 | 100500504 | Protein | Increase | SEQ ID NO: 318 | SEQ ID NO: 539 |
| Biotic stress | LOC100811309 | 100787186 | Protein | Decrease | SEQ ID NO: 319 | SEQ ID NO: 540 |
| Biotic stress | LOC100794096 | 100794096 | Protein | Increase | SEQ ID NO: 320 | SEQ ID NO: 541 |
| Biotic stress | LOC100795239 | 100795239 | Protein | Increase | SEQ ID NO: 321 | SEQ ID NO: 542 |
| Biotic stress | RLK | 100795799 | Protein | Increase | SEQ ID NO: 322 | SEQ ID NO: 543 |
| Biotic stress | VLXB | 100797716 | Protein | Increase | SEQ ID NO: 323 | SEQ ID NO: 544 |
| Biotic stress | LOC547834 | 100797843 | Protein | Increase | SEQ ID NO: 324 | SEQ ID NO: 545 |
| Biotic stress | NES | 100799695 | Protein | Increase | SEQ ID NO: 325 | SEQ ID NO: 546 |
| Biotic stress | LOC547704 | 100803679 | Protein | Increase | SEQ ID NO: 326 | SEQ ID NO: 547 |
| Biotic stress | HSP70 | 100816111 | Protein | Decrease | SEQ ID NO: 327 | SEQ ID NO: 548 |
| Flowering Time | SOYAP1 | 547478 | Protein | Increase/Decrease | SEQ ID NO: 328 | SEQ ID NO: 549 |
| Flowering Time | PHYA | 547810 | Protein | Increase/Decrease | SEQ ID NO: 329 | SEQ ID NO: 550 |
| Flowering Time | LOC100037477 | 100037477 | Protein | Increase/Decrease | SEQ ID NO: 330 | SEQ ID NO: 551 |
| Flowering Time | CRY1a | 100233233 | Protein | Increase/Decrease | SEQ ID NO: 331 | SEQ ID NO: 552 |
| Flowering Time | TOC1 | 100271889 | Protein | Increase/Decrease | SEQ ID NO: 332 | SEQ ID NO: 553 |
| Flowering Time | COL2a | 100301885 | Protein | Increase/Decrease | SEQ ID NO: 333 | SEQ ID NO: 554 |
| Flowering Time | FKF1 | 100301889 | Protein | Increase/Decrease | SEQ ID NO: 334 | SEQ ID NO: 555 |
| Flowering Time | AGL11 | 100301905 | Protein | Increase/Decrease | SEQ ID NO: 335 | SEQ ID NO: 556 |
| Flowering Time | GMMFT | 100306314 | Protein | Increase/Decrease | SEQ ID NO: 336 | SEQ ID NO: 557 |
| Flowering Time | GIGANTEA | 100779044 | Protein | Increase/Decrease | SEQ ID NO: 337 | SEQ ID NO: 558 |
| Flowering Time | GMFT3B | 100781509 | Protein | Increase/Decrease | SEQ ID NO: 338 | SEQ ID NO: 559 |
| Flowering Time | FLD | 100786453 | Protein | Increase/Decrease | SEQ ID NO: 339 | SEQ ID NO: 560 |
| Flowering Time | ELF3A | 100793561 | Protein | Increase/Decrease | SEQ ID NO: 340 | SEQ ID NO: 561 |
| Flowering Time | CIB1 | 100794256 | Protein | Increase/Decrease | SEQ ID NO: 341 | SEQ ID NO: 562 |
| Flowering Time | GMFT5A | 100796994 | Protein | Increase/Decrease | SEQ ID NO: 342 | SEQ ID NO: 563 |
| Flowering Time | LOC100799720 | 100799720 | Protein | Increase/Decrease | SEQ ID NO: 343 | SEQ ID NO: 564 |
| Flowering Time | PHYB | 100799831 | Protein | Increase/Decrease | SEQ ID NO: 344 | SEQ ID NO: 565 |
| Flowering Time | GMGIA | 100800578 | Protein | Increase/Decrease | SEQ ID NO: 345 | SEQ ID NO: 566 |
| Flowering Time | LOC100801792 | 100801792 | Protein | Increase/Decrease | SEQ ID NO: 346 | SEQ ID NO: 567 |
| Flowering Time | GMFT3A | 100803909 | Protein | Increase/Decrease | SEQ ID NO: 347 | SEQ ID NO: 568 |
| Flowering Time | LOC100810415 | 100810415 | Protein | Increase/Decrease | SEQ ID NO: 348 | SEQ ID NO: 569 |
| Flowering Time | GMFT2A | 100814951 | Protein | Increase/Decrease | SEQ ID NO: 349 | SEQ ID NO: 570 |
| Flowering Time | LOC102666452 | 102666452 | Protein | Increase/Decrease | SEQ ID NO: 350 | SEQ ID NO: 571 |
| Flowering Time | LOC102667341 | 102667341 | Protein | Increase/Decrease | SEQ ID NO: 351 | SEQ ID NO: 572 |
| Flowering Time | LOC102670334 | 102670334 | Protein | Increase/Decrease | SEQ ID NO: 352 | SEQ ID NO: 573 |
| Nutrient use efficiency | MIPS | 547604 | Protein | Decrease | SEQ ID NO: 353 | SEQ ID NO: 574 |
| Nutrient use efficiency | DMT1 | 547711 | Protein | Increase | SEQ ID NO: 354 | SEQ ID NO: 575 |
| Nutrient use efficiency | LOX1.2 | 547774 | Protein | Decrease | SEQ ID NO: 355 | SEQ ID NO: 576 |
| Nutrient use efficiency | ACPD | 547808 | Protein | Decrease | SEQ ID NO: 356 | SEQ ID NO: 577 |
| Nutrient use efficiency | LOX1.3 | 547869 | Protein | Knockout/Decrease | SEQ ID NO: 357 | SEQ ID NO: 578 |
| Nutrient use efficiency | AS2 | 547894 | Protein | Increase | SEQ ID NO: 358 | SEQ ID NO: 579 |
| Nutrient use efficiency | AS1 | 547895 | Protein | Increase | SEQ ID NO: 359 | SEQ ID NO: 580 |
| Nutrient use efficiency | LOX1.1 | 547923 | Protein | Knockout/Decrease | SEQ ID NO: 360 | SEQ ID NO: 581 |
| Nutrient use efficiency | LOC547940 | 547940 | Protein | Increase | SEQ ID NO: 361 | SEQ ID NO: 582 |
| Nutrient use efficiency | NRT2 | 547946 | Protein | Increase | SEQ ID NO: 362 | SEQ ID NO: 583 |
| Nutrient use efficiency | GS | 548082 | Protein | Increase | SEQ ID NO: 363 | SEQ ID NO: 584 |
| Nutrient use efficiency | IPK1 | 100127406 | Protein | Knockout/Decrease | SEQ ID NO: 364 | SEQ ID NO: 585 |
| Nutrient use efficiency | SAD2 | 100217331 | Protein | Decrease | SEQ ID NO: 365 | SEQ ID NO: 586 |
| Nutrient use efficiency | LOC100527257 | 100527257 | Protein | Increase | SEQ ID NO: 366 | SEQ ID NO: 587 |
| Nutrient use efficiency | LOC100775983 | 100775983 | Protein | Increase | SEQ ID NO: 367 | SEQ ID NO: 588 |
| Nutrient use efficiency | PHR1 | 100783132 | Protein | Increase | SEQ ID NO: 368 | SEQ ID NO: 589 |
| Nutrient use efficiency | GMPT5 | 100786638 | Protein | Increase | SEQ ID NO: 369 | SEQ ID NO: 590 |
| Nutrient use efficiency | PAP4 | 100790529 | Protein | Increase | SEQ ID NO: 370 | SEQ ID NO: 591 |
| Photosyntheiss | VDE | 100778118 | Protein | Increase | SEQ ID NO: 371 | SEQ ID NO: 592 |
| Photosyntheiss | PSBS | 100779417 | Protein | Increase | SEQ ID NO: 372 | SEQ ID NO: 593 |
| Photosyntheiss | ZEP | 100800186 | Protein | Increase | SEQ ID NO: 373 | SEQ ID NO: 594 |
| Photosyntheiss | PSBS | 100807355 | Protein | Increase | SEQ ID NO: 374 | SEQ ID NO: 595 |
| Photosyntheiss | VDE | 100816085 | Protein | Increase | SEQ ID NO: 375 | SEQ ID NO: 596 |
| Photosyntheiss | ZEP | 100820171 | Protein | Increase | SEQ ID NO: 376 | SEQ ID NO: 597 |
| Photosynthesis | DREB1 | 547642 | Protein | Increase | SEQ ID NO: 377 | SEQ ID NO: 598 |
| Photosynthesis | VPE | 547964 | Protein | Increase | SEQ ID NO: 378 | SEQ ID NO: 599 |
| Photosynthesis | PIP | 100811119 | Protein | Increase | SEQ ID NO: 379 | SEQ ID NO: 600 |
| Resource partitioning | AO | 547647 | Protein | Increase | SEQ ID NO: 380 | SEQ ID NO: 601 |
| Resource partitioning | ACPD | 547808 | Protein | Decrease | SEQ ID NO: 381 | SEQ ID NO: 602 |
| Resource partitioning | FBP | 547809 | Protein | Increase | SEQ ID NO: 382 | SEQ ID NO: 603 |
| Resource partitioning | AS1 | 547895 | Protein | Increase | SEQ ID NO: 383 | SEQ ID NO: 604 |
| Resource partitioning | REDUCTASE | 547911 | Protein | Increase | SEQ ID NO: 384 | SEQ ID NO: 605 |
| Resource partitioning | LOC547940 | 547940 | Protein | Increase | SEQ ID NO: 385 | SEQ ID NO: 606 |
| Resource partitioning | DGAT1C | 547982 | Protein | Increase/Decrease | SEQ ID NO: 386 | SEQ ID NO: 607 |
| Resource partitioning | DGAT1C | 547982 | Protein | Increase/Decrease | SEQ ID NO: 387 | SEQ ID NO: 608 |
| Resource partitioning | DGAT1A | 548005 | Protein | Increase/Decrease | SEQ ID NO: 388 | SEQ ID NO: 609 |
| Resource partitioning | DGAT1A | 548005 | Protein | Increase/Decrease | SEQ ID NO: 389 | SEQ ID NO: 610 |
| Resource partitioning | GOLS | 548050 | Protein | Decrease | SEQ ID NO: 390 | SEQ ID NO: 611 |
| Resource partitioning | BBI | 548083 | Protein | Decrease | SEQ ID NO: 391 | SEQ ID NO: 612 |
| Resource partitioning | DGAT1B | 732606 | Protein | Increase/Decrease | SEQ ID NO: 392 | SEQ ID NO: 613 |
| Resource partitioning | Dof4 | 778097 | Protein | Increase | SEQ ID NO: 393 | SEQ ID NO: 614 |
| Resource partitioning | MYB73 | 778179 | Protein | Increase/Decrease | SEQ ID NO: 394 | SEQ ID NO: 615 |
| Resource partitioning | IFS1 | 100037450 | Protein | Increase | SEQ ID NO: 395 | SEQ ID NO: 616 |
| Resource partitioning | SACPD-C | 100037478 | Protein | Increase/Decrease | SEQ ID NO: 396 | SEQ ID NO: 617 |
| Resource partitioning | FAD3 | 100038323 | Protein | Increase/Decrease | | SEQ ID NO: 618 |
| Resource partitioning | AAH1 | 100137075 | Protein | Increase | SEQ ID NO: 398 | SEQ ID NO: 619 |
| Resource partitioning | LOC100194415 | 100194415 | Protein | Increase | SEQ ID NO: 399 | SEQ ID NO: 620 |
| Resource partitioning | COL2a | 100301885 | Protein | Regulate for Flowering | SEQ ID NO: 400 | SEQ ID NO: 621 |
| Resource partitioning | CYP73A11 | 100499623 | Protein | Increase | SEQ ID NO: 401 | SEQ ID NO: 622 |
| Resource partitioning | LOC100499629 | 100499629 | Protein | Decrease | SEQ ID NO: 402 | SEQ ID NO: 623 |
| Resource partitioning | LOC100775672 | 100775672 | Protein | Increase | SEQ ID NO: 403 | SEQ ID NO: 624 |
| Resource partitioning | LOC100775983 | 100775983 | Protein | Increase | SEQ ID NO: 404 | SEQ ID NO: 625 |
| Resource partitioning | PHYTASE | 100778145 | Protein | Increase | SEQ ID NO: 405 | SEQ ID NO: 626 |
| Resource partitioning | LOC100783693 | 100783693 | Protein | Increase | SEQ ID NO: 406 | SEQ ID NO: 627 |
| Resource partitioning | LOC100788179 | 100788179 | Protein | Increase | SEQ ID NO: 407 | SEQ ID NO: 628 |
| Resource partitioning | TFL1.1 | 100791809 | Protein | Regulate for Flowering | SEQ ID NO: 408 | SEQ ID NO: 629 |
| Resource partitioning | LOC100797018 | 100797018 | Protein | Increase | SEQ ID NO: 409 | SEQ ID NO: 630 |
| Resource partitioning | LOC100799931 | 100799931 | Protein | Increase | SEQ ID NO: 410 | SEQ ID NO: 631 |
| Resource partitioning | LOC100800931 | 100800931 | Protein | Increase | SEQ ID NO: 411 | SEQ ID NO: 632 |
| Resource partitioning | LOC100803398 | 100803398 | Protein | Increase | SEQ ID NO: 412 | SEQ ID NO: 633 |
| Resource partitioning | FAD2 | 100805777 | Protein | Increase/Decrease | SEQ ID NO: 413 | SEQ ID NO: 634 |
| Resource partitioning | LOC100807749 | 100807749 | Protein | Increase | SEQ ID NO: 414 | SEQ ID NO: 635 |
| Resource partitioning | LOC100809706 | 100809706 | Protein | Increase | SEQ ID NO: 415 | SEQ ID NO: 636 |
| Resource partitioning | LOC100813937 | 100813937 | Protein | Decrease | SEQ ID NO: 416 | SEQ ID NO: 637 |
| Resource partitioning | LOC100814531 | 100814531 | Protein | Increase | SEQ ID NO: 417 | SEQ ID NO: 638 |
| Resource partitioning | GMFT2A | 100814951 | Protein | Increase/Decrease | SEQ ID NO: 418 | SEQ ID NO: 639 |
| Resource partitioning | LOC102666452 | 102666452 | Protein | Regulate for Flowering | SEQ ID NO: 419 | SEQ ID NO: 640 |
| Senescence | GST | 547580 | Protein | Decrease | SEQ ID NO: 420 | SEQ ID NO: 641 |
| Senescence | NRP-A | 547685 | Protein | Increase/Decrease | SEQ ID NO: 421 | SEQ ID NO: 642 |
| Senescence | PGIP | 547838 | Protein | Increase/Decrease | SEQ ID NO: 422 | SEQ ID NO: 643 |
| Senescence | VPE | 547964 | Protein | Decrease | SEQ ID NO: 423 | SEQ ID NO: 644 |
| Senescence | NAC2 | 732553 | Protein | Decrease | SEQ ID NO: 424 | SEQ ID NO: 645 |
| Senescence | SGR1 | 732647 | Protein | Increase | SEQ ID NO: 425 | SEQ ID NO: 646 |
| Senescence | petB | 3989327 | Protein | Increase | SEQ ID NO: 426 | |
| Senescence | SAN1A | 100101864 | Protein | Decrease | SEQ ID NO: 427 | SEQ ID NO: 648 |
| Senescence | LOC100233234 | 100233234 | Protein | Increase/Decrease | SEQ ID NO: 428 | SEQ ID NO: 649 |
| Senescence | GMSGR | 100301892 | Protein | Increase | SEQ ID NO: 429 | SEQ ID NO: 650 |
| Senescence | CIB1 | 100794256 | Protein | Increase/Decrease | SEQ ID NO: 430 | SEQ ID NO: 651 |
| Senescence | LOC100808627 | 100808627 | Protein | Increase/Decrease | SEQ ID NO: 431 | SEQ ID NO: 652 |
| Senescence | SAN1B | 100810801 | Protein | Increase | SEQ ID NO: 432 | SEQ ID NO: 653 |
| Senescence | GMCRY2B | 100811759 | Protein | Increase/Decrease | SEQ ID NO: 433 | SEQ ID NO: 654 |
| Senescence | SAN1C | 100811875 | Protein | Increase/Decrease | SEQ ID NO: 434 | |
| Yield | LOC100777102 | 100777102 | Protein | increase | SEQ ID NO: 435 | SEQ ID NO: 656 |

[0358] All cited patents and patent publications referred to in this application are incorporated herein by reference in their entirety. All of the materials and methods disclosed and claimed herein can be made and used without undue experimentation as instructed by the above disclosure and illustrated by the examples. Although the materials and methods of this invention have been described in terms of embodiments and illustrative examples, it will be apparent to those of skill in the art that substitutions and variations can be applied to the materials and methods described herein without departing from the concept, spirit, and scope of the invention. For instance, while the particular examples provided illustrate the methods and embodiments described herein using a specific plant, the principles in these examples are applicable to any plant of interest; similarly, while the particular examples provided illustrate the methods and embodiments described herein using a particular sequence-specific nuclease such as Cas9, one of skill in the art would recognize that alternative sequence-specific nucleases (e. g., CRISPR nucleases other than Cas9, such as CasX, CasY, and Cpf1, zinc-finger nucleases, transcription activator-like effector nucleases, Argonaute proteins, and meganucleases) are useful in various embodiments. All such similar substitutes and modifications apparent to those skilled in the art are deemed to be within the spirit, scope, and concept of the invention as encompassed by the embodiments of the inventions recited herein and the specification and appended claims.

We claim:

1. A modified soybean cell, wherein the modified soybean cell comprises two or more targeted modifications, wherein at least one of the targeted modifications occurs in a gene selected from the list of genes in Table 10 or in a regulatory sequence affecting the expression of the gene.

2. The modified soybean cell of claim 1, wherein the gene is associated with a trait, and wherein the trait is selected from the group consisting of abiotic stress, architecture, biotic stress, nutrient use efficiency, photosynthesis, resource partitioning, and senescence, and wherein the modification improves the trait in a cell comprising the modification relative to a cell lacking the modification, or in a plant grown from a cell comprising the modification relative to a plant lacking the modification.

3. The modified soybean cell of claim 1, wherein the targeted gene, before modification, is at least 60%, at least 65%, at least 70%, at least 75%, at least 80%, at least 85%, at least 90%, at least 91%, at least 92%, at least 93%, at least 94%, at least 95%, at least 96%, at least 97%, at least 98%, at least 99% or 100% identical to a nucleic acid sequence listed in Table 10.

4. The modified soybean cell of claim 1, wherein the targeted gene encodes a protein, and wherein the amino acid sequence of the encoded protein before targeting is at least 90%, at least 91%, at least 92%, at least 93%, at least 94%, at least 95%, at least 96%, at least 97%, at least 98%, at least 99% or 100% identical to the amino acid sequence of a protein listed in Table 10.

5. The modified soybean cell of claim 1, wherein the targeted modifications result in increased expression of the gene or decreased expression of the gene.

6. The modified soybean cell of claim 1, wherein at least one targeted modification comprises a modification selected from the group consisting of: insertion of a nucleotide sequence encoded by a polynucleotide donor molecule; deletion of genomic sequence at a double-strand break in the genome or between multiple double-strand breaks in the genome; and a change in nucleic acid or amino acid sequence.

7. The modified soybean cell of claim 6, wherein the insertion comprises or creates an upregulatory sequence.

8. The modified soybean cell of claim 6, wherein the insertion comprises or creates a down-regulatory sequence.

9. The modified soybean cell of claim 1, wherein at least one targeted modification knocks out expression of the targeted gene.

10. The modified soybean cell of claim 1, wherein at least one targeted modification comprises the insertion or creation of at least one transcription factor binding site.

11. The modified soybean cell of claim 1, wherein at least one targeted modification is the introduction of a sequence recognizable by a specific binding agent, and wherein contacting the sequence with the specific binding agent results in a change of expression of a sequence of interest.

12. The modified soybean cell of claim 1, wherein at least one targeted modification includes the introduction of a nucleotide sequence that encodes an RNA molecule or an amino acid sequence that is recognizable by a specific binding agent.

13. The modified soybean cell of claim 1, wherein the modified soybean cell comprises an inserted regulatory sequence selected from the sequences listed in Table 9.

14. The modified soybean cell of claim 1, wherein the modified soybean cell is an isolated cell or protoplast.

15. The modified soybean cell of claim 1, wherein the modified soybean cell is in a soybean plant, or in a zygotic or somatic embryo, seed, part, or tissue of a soybean plant.

16. The modified soybean cell of claim 1, wherein the modified soybean cell is capable of division or differentiation.

17. The modified soybean cell of claim 1, wherein the modified soybean cell is haploid, diploid, or polyploid.

18. The modified soybean cell of claim 1, wherein the modified soybean cell is a meristematic cell, embryonic cell, or germline cell.

19. The modified soybean cell of claim 1, wherein the modifications are determined relative to a parent plant cell, and wherein the modified plant cell is devoid of mitotically or meiotically generated genetic or epigenetic changes relative to the parent plant cell.

20. A modified soybean plant comprising the modified soybean cell of claim 1, or a progeny plant or progeny seed of the modified soybean plant, wherein cells of the modified soybean plant, progeny plant, or progeny seed comprise the targeted modifications.

The application's sequence listing, which the Patent Office published only in electronic form, follows.

SEQUENCE LISTING (761 sequences)

SEQ ID NO: 1 - DNA, 11 bp, synthetic construct
  source 1..11: mol_type = other DNA
cctcgtgtctc

SEQ ID NO: 2 - DNA, 11 bp, synthetic construct
  source 1..11: mol_type = other DNA
ccttttgtctc

SEQ ID NO: 3 - DNA, 11 bp, synthetic construct
  source 1..11: mol_type = other DNA
ccttttgtcnc

SEQ ID NO: 4-5 - skipped (2 entries)

SEQ ID NO: 6 - protein, 6 aa, synthetic construct
DLNXXP

SEQ ID NO: 7 - DNA, 34 bp, synthetic construct
  source 1..34: mol_type = other DNA
ataacttcgtatagcatacattatacgaagttat

SEQ ID NO: 8 - DNA, 34 bp, synthetic construct
  source 1..34: mol_type = other DNA
ataacttcgtataatgtatgctatacgaagttat

SEQ ID NO: 9 - DNA, 34 bp, synthetic construct
  source 1..34: mol_type = other DNA
ataacttcgtatannntannntatacgaagttat

SEQ ID NO: 10 - DNA, 34 bp, synthetic construct
  source 1..34: mol_type = other DNA
ataacttcgtataatgtatactatacgaagttat

SEQ ID NO: 11 - DNA, 34 bp, synthetic construct
  source 1..34: mol_type = other DNA
ataacttcgtataatgtgtactatacgaagttat

SEQ ID NO: 12 - DNA, 34 bp, synthetic construct
  source 1..34: mol_type = other DNA
ataacttcgtataaagtatcctatacgaagttat

SEQ ID NO: 13 - DNA, 34 bp, synthetic construct
  source 1..34: mol_type = other DNA
ataacttcgtataagaaaccatatacgaagttat

SEQ ID NO: 14 - DNA, 34 bp, synthetic construct
  source 1..34: mol_type = other DNA
ataacttcgtatataataccatatacgaagttat

SEQ ID NO: 15 - DNA, 34 bp, synthetic construct
  source 1..34: mol_type = other DNA
ataacttcgtataagatagaatatacgaagttat

SEQ ID NO: 16 - DNA, 34 bp, synthetic construct; identical to SEQ ID NO: 15
  source 1..34: mol_type = other DNA

SEQ ID NO: 17 - DNA, 34 bp, synthetic construct
  source 1..34: mol_type = other DNA
taccgttcgtatannntannntatacgaagttat

SEQ ID NO: 18 - DNA, 34 bp, synthetic construct
  source 1..34: mol_type = other DNA
ataacttcgtatannntannntatacgaacggta

SEQ ID NO: 19-21 - skipped (3 entries)

SEQ ID NO: 22 - DNA, 10 bp, synthetic construct
  source 1..10: mol_type = other DNA
gacacgtaga

SEQ ID NO: 23 - DNA, 14 bp, synthetic construct
  source 1..14: mol_type = other DNA
ttdccwwwwwwggh

SEQ ID NO: 24 - DNA, 11 bp, synthetic construct
  source 1..11: mol_type = other DNA
ccatttttagt

SEQ ID NO: 25 - DNA, 10 bp, synthetic construct
  source 1..10: mol_type = other DNA
ccatttttgg

SEQ ID NO: 26 - DNA, 18 bp, synthetic construct
  source 1..18: mol_type = other DNA
nttdccwwwwnnggwaan

SEQ ID NO: 27 - DNA, 18 bp, synthetic construct
  source 1..18: mol_type = other DNA
nnwnccawwwwtrgwwan

SEQ ID NO: 28 - DNA, 16 bp, synthetic construct
  source 1..16: mol_type = other DNA
ttwcyawwwwtrgwaa

SEQ ID NO: 29 - DNA, 10 bp, synthetic construct
  source 1..10: mol_type = other DNA
ccatttttag

SEQ ID NO: 30 - DNA, 10 bp, synthetic construct
  source 1..10: mol_type = other DNA
ccatttttgg

SEQ ID NO: 31-39 - skipped (9 entries)

SEQ ID NO: 40 - DNA, 10 bp, synthetic construct
  source 1..10: mol_type = other DNA
ccwwwwwwgg

SEQ ID NO: 41 - DNA, 18 bp, synthetic construct
  source 1..18: mol_type = other DNA
gtttacataaatggaaaa

SEQ ID NO: 42 - DNA, 18 bp, synthetic construct
  source 1..18: mol_type = other DNA
cttacctttcatggatta

SEQ ID NO: 43 - DNA, 18 bp, synthetic construct
  source 1..18: mol_type = other DNA
ctttccatttttagtaac

SEQ ID NO: 44-46 - skipped (3 entries)

SEQ ID NO: 47 - DNA, 10 bp, synthetic construct
  source 1..10: mol_type = other DNA
aaacaatcta

SEQ ID NO: 48 - DNA, 15 bp, synthetic construct
  source 1..15: mol_type = other DNA
aaaaaaaatctatga

SEQ ID NO: 49-55 - skipped (7 entries)

SEQ ID NO: 56 - DNA, 23 bp, synthetic construct
  source 1..23: mol_type = other DNA
ttcaagggggcatgtatcttgaa

SEQ ID NO: 57 - DNA, 23 bp, synthetic construct
  source 1..23: mol_type = other DNA
ttcaagggggcatgtatcttgaa

SEQ ID NO: 58 - DNA, 23 bp, synthetic construct
  source 1..23: mol_type = other DNA
ttcaagggggcatgtatcttgaa

SEQ ID NO: 59 - DNA, 29 bp, synthetic construct
  source 1..29: mol_type = other DNA
ggattcaagggggcatgtatcttgaatcc

SEQ ID NO: 60 - DNA, 11 bp, synthetic construct
  source 1..11: mol_type = other DNA
taagagccgcc

SEQ ID NO: 61-66 - skipped (6 entries)

SEQ ID NO: 67 - DNA, 15 bp, synthetic construct
  source 1..15: mol_type = other DNA
tgtgtggttaatatg

SEQ ID NO: 68-70 - skipped (3 entries)

SEQ ID NO: 71 - DNA, 10 bp, synthetic construct
  source 1..10: mol_type = other DNA
cgtcaatgaa

SEQ ID NO: 72 - DNA, 13 bp, synthetic construct
  source 1..13: mol_type = other DNA
catacgtcgtcaa

SEQ ID NO: 73 - skipped

SEQ ID NO: 74 - DNA, 10 bp, synthetic construct
  source 1..10: mol_type = other DNA
acgtcataga

SEQ ID NO: 75 - DNA, 10 bp, synthetic construct
  source 1..10: mol_type = other DNA
tctacgtcac

SEQ ID NO: 76 - skipped

SEQ ID NO: 77 - DNA, 12 bp, synthetic construct
  source 1..12: mol_type = other DNA
tctaacctacca

SEQ ID NO: 78-83 - skipped (6 entries)

SEQ ID NO: 84 - DNA, 26 bp, synthetic construct
  source 1..26: mol_type = other DNA
atcttatgtcattgatgacgacctcc

SEQ ID NO: 85 - DNA, 11 bp, synthetic construct
  source 1..11: mol_type = other DNA
tacacttttgg

SEQ ID NO: 86 - DNA, 20 bp, synthetic construct
  source 1..20: mol_type = other DNA
tgacgyaagsrmtkacgymm

SEQ ID NO: 87-88 - skipped (2 entries)

SEQ ID NO: 89 - DNA, 20 bp, synthetic construct
  source 1..20: mol_type = other DNA
ttggttttgatcaaaaccaa

SEQ ID NO: 90 - DNA, 15 bp, synthetic construct
  source 1..15: mol_type = other DNA
taattgactcaatta

SEQ ID NO: 91-95 - skipped (5 entries)

SEQ ID NO: 96 - DNA, 16 bp, synthetic construct
  source 1..16: mol_type = other DNA
aggggcataatggtaa

SEQ ID NO: 97-100 - skipped (4 entries)

SEQ ID NO: 101 - DNA, 16 bp, synthetic construct
  source 1..16: mol_type = other DNA
aaaacagaataggaaa

SEQ ID NO: 102-104 - skipped (3 entries)

SEQ ID NO: 105 - DNA, 12 bp, synthetic construct
  source 1..12: mol_type = other DNA
ccaatttaatgg

SEQ ID NO: 106 - skipped

SEQ ID NO: 107 - DNA, 19 bp, synthetic construct
  source 1..19: mol_type = other DNA
cttaaaccctaggggtaat

SEQ ID NO: 108 - DNA, 10 bp, synthetic construct
  source 1..10: mol_type = other DNA
ttwtactagt

SEQ ID NO: 109-111 - skipped (3 entries)

SEQ ID NO: 112 - DNA, 10 bp, synthetic construct
  source 1..10: mol_type = other DNA
ttgcatgact

SEQ ID NO: 113-118 - skipped (6 entries)

SEQ ID NO: 119 - DNA, 34 bp, synthetic construct
  source 1..34: mol_type = other DNA
gtttaattgagttgtcatatgttaataacggtat

SEQ ID NO: 120 - DNA, 34 bp, synthetic construct
  source 1..34: mol_type = other DNA
ataccgttattaacatatgacaactcaattaaac

SEQ ID NO: 121 - DNA, 34 bp, synthetic construct
  source 1..34: mol_type = other DNA
ccgacaaaaggccgacaaaaggccgacaaaaggt

SEQ ID NO: 122 - DNA, 34 bp, synthetic construct
  source 1..34: mol_type = other DNA
accttttgtcggccttttgtcggccttttgtcgg

SEQ ID NO: 123 - DNA, 68 bp, synthetic construct
  source 1..68: mol_type = other DNA
gccgacaaaaggccgacaaaaggccgacaaaaggccgacaaaaggccgacaaaaggccgacaaaaggt

SEQ ID NO: 124 - DNA, 68 bp, synthetic construct
  source 1..68: mol_type = other DNA
accttttgtcggccttttgtcggccttttgtcggccttttgtcggccttttgtcggccttttgtcggc

SEQ ID NO: 125 - DNA, 100 bp, synthetic construct
  source 1..100: mol_type = other DNA
ccgacaaaaggccgacaaaaggccgacaaaaggccgacaaaaggccgacaaaaggccgacaaaaggccgacaaaaggccgacaaaaggccgacaaaaggt

SEQ ID NO: 126 - DNA, 100 bp, synthetic construct
  source 1..100: mol_type = other DNA
accttttgtcggccttttgtcggccttttgtcggccttttgtcggccttttgtcggccttttgtcggccttttgtcggccttttgtcggccttttgtcgg

SEQ ID NO: 127 - DNA, 34 bp, synthetic construct; identical to SEQ ID NO: 7
  source 1..34: mol_type = other DNA

SEQ ID NO: 128 - DNA, 34 bp, synthetic construct; identical to SEQ ID NO: 8
  source 1..34: mol_type = other DNA

SEQ ID NO: 129 - DNA, 34 bp, synthetic construct; identical to SEQ ID NO: 9
  source 1..34: mol_type = other DNA

SEQ ID NO: 130 - DNA, 34 bp, synthetic construct; identical to SEQ ID NO: 10
  source 1..34: mol_type = other DNA

SEQ ID NO: 131 - DNA, 34 bp, synthetic construct; identical to SEQ ID NO: 11
  source 1..34: mol_type = other DNA

SEQ ID NO: 132 - DNA, 34 bp, synthetic construct; identical to SEQ ID NO: 12
  source 1..34: mol_type = other DNA

SEQ ID NO: 133 - DNA, 34 bp, synthetic construct; identical to SEQ ID NO: 13
  source 1..34: mol_type = other DNA

SEQ ID NO: 134 - DNA, 34 bp, synthetic construct; identical to SEQ ID NO: 14
  source 1..34: mol_type = other DNA

SEQ ID NO: 135 - DNA, 34 bp, synthetic construct; identical to SEQ ID NO: 15
  source 1..34: mol_type = other DNA

SEQ ID NO: 136 - DNA, 34 bp, synthetic construct; identical to SEQ ID NO: 15
  source 1..34: mol_type = other DNA

SEQ ID NO: 137 - DNA, 34 bp, synthetic construct; identical to SEQ ID NO: 17
  source 1..34: mol_type = other DNA

SEQ ID NO: 138 - DNA, 34 bp, synthetic construct; identical to SEQ ID NO: 18
  source 1..34: mol_type = other DNA

SEQ ID NO: 139 - DNA, 20 bp, synthetic construct
  source 1..20: mol_type = other DNA
gtgctctctctcttctgtca

SEQ ID NO: 140 - DNA, 20 bp, synthetic construct
  source 1..20: mol_type = other DNA
ctgctctctctcttctgtca

SEQ ID NO: 141 - DNA, 20 bp, synthetic construct
  source 1..20: mol_type = other DNA
ttgcttactctcttctgtca

SEQ ID NO: 142 - DNA, 20 bp, synthetic construct
  source 1..20: mol_type = other DNA
ccgctctctctcttctgtca

SEQ ID NO: 143 - DNA, 21 bp, synthetic construct
  source 1..21: mol_type = other DNA
tggagctcccttcattccaat

SEQ ID NO: 144 - DNA, 21 bp, synthetic construct
  source 1..21: mol_type = other DNA
tcgagttcccttcattccaat

SEQ ID NO: 145 - DNA, 21 bp, synthetic construct
  source 1..21: mol_type = other DNA
atgagctctcttcaaaccaaa

SEQ ID NO: 146 - DNA, 21 bp, synthetic construct
  source 1..21: mol_type = other DNA
tggagctcccttcattccaag

SEQ ID NO: 147 - DNA, 21 bp, synthetic construct
  source 1..21: mol_type = other DNA
tagagcttccttcaaaccaaa

SEQ ID NO: 148 - DNA, 21 bp, synthetic construct
  source 1..21: mol_type = other DNA
tggagctccattcgatccaaa

SEQ ID NO: 149 - DNA, 21 bp, synthetic construct
  source 1..21: mol_type = other DNA
agcagctcccttcaaaccaaa

SEQ ID NO: 150 - DNA, 21 bp, synthetic construct
  source 1..21: mol_type = other DNA
cagagctcccttcactccaat

SEQ ID NO: 151 - DNA, 21 bp, synthetic construct
  source 1..21: mol_type = other DNA
tggagctcccttcactccaat

SEQ ID NO: 152 - DNA, 21 bp, synthetic construct
  source 1..21: mol_type = other DNA
tggagctcccttcactccaag

SEQ ID NO: 153 - DNA, 21 bp, synthetic construct
  source 1..21: mol_type = other DNA
tggagctccctttaatccaat

SEQ ID NO: 154 - DNA, 21 bp, synthetic construct
  source 1..21: mol_type = other DNA
ttgggatgaagcctggtccgg

SEQ ID NO: 155 - DNA, 21 bp, synthetic construct
  source 1..21: mol_type = other DNA
ctgggatgaagcctggtccgg

SEQ ID NO: 156 - DNA, 21 bp, synthetic construct
  source 1..21: mol_type = other DNA
ctggaatgaagcctggtccgg

SEQ ID NO: 157 - DNA, 20 bp, synthetic construct
  source 1..20: mol_type = other DNA
cgggatgaagcctggtccgg

SEQ ID NO: 158 - DNA, 21 bp, synthetic construct
  source 1..21: mol_type = other DNA
gagatcaggctggcagcttgt

SEQ ID NO: 159 - DNA, 21 bp, synthetic construct
  source 1..21: mol_type = other DNA
tagatcaggctggcagcttgt

SEQ ID NO: 160 - DNA, 21 bp, synthetic construct
  source 1..21: mol_type = other DNA
aagatcaggctggcagcttgt

SEQ ID NO: 161 - DNA, 20 bp, synthetic construct
  source 1..20: mol_type = other DNA
gtgctctctctcttctgtca

SEQ ID NO: 162 - DNA, 20 bp, synthetic construct
  source 1..20: mol_type = other DNA
ctgctctctctcttctgtca

SEQ ID NO: 163 - DNA, 20 bp, synthetic construct
  source 1..20: mol_type = other DNA
ttgcttactctcttctgtca

SEQ ID NO: 164 - DNA, 20 bp, synthetic construct
  source 1..20: mol_type = other DNA
ccgctctctctcttctgtca

SEQ ID NO: 165 - DNA, 21 bp, synthetic construct
  source 1..21: mol_type = other DNA
tggcatgcagggagccaggca

SEQ ID NO: 166 - DNA, 21 bp, synthetic construct
  source 1..21: mol_type = other DNA
aggaatacagggagccaggca

SEQ ID NO: 167 - DNA, 21 bp, synthetic construct
  source 1..21: mol_type = other DNA
gggtttacagggagccaggca

SEQ ID NO: 168 - DNA, 21 bp, synthetic construct
  source 1..21: mol_type = other DNA
aggcatacagggagccaggca

SEQ ID NO: 169 - DNA, 21 bp, synthetic construct
  source 1..21: mol_type = other DNA
aaacaatgcgatccctttgga

SEQ ID NO: 170 - DNA, 21 bp, synthetic construct
  source 1..21: mol_type = other DNA
agaccatgcgatccctttgga

SEQ ID NO: 171 - DNA, 21 bp, synthetic construct
  source 1..21: mol_type = other DNA
ggtcagagcgatccctttggc

SEQ ID NO: 172 - DNA, 21 bp, synthetic construct
  source 1..21: mol_type = other DNA
agacaatgcgatccctttgga

SEQ ID NO: 173 - DNA, 22 bp, synthetic construct
  source 1..22: mol_type = other DNA
tcgttcaagaaagcctgtggaa

SEQ ID NO: 174 - DNA, 21 bp, synthetic construct
  source 1..21: mol_type = other DNA
cgttcaagaaagcctgtggaa

SEQ ID NO: 175 - DNA, 22 bp, synthetic construct
  source 1..22: mol_type = other DNA
tcgttcaagaaagcatgtggaa

SEQ ID NO: 176 - DNA, 22 bp, synthetic construct
  source 1..22: mol_type = other DNA
acgttcaagaaagcttgtggaa

SEQ ID NO: 177 - DNA, 21 bp, synthetic construct
  source 1..21: mol_type = other DNA
cgttcaagaaagcctgtggaa

SEQ ID NO: 178 - DNA, 300 bp, synthetic construct
  source 1..300: mol_type = other DNA
ggacaacaagcaccttcttgccttgcaaggcctcccttccctatggtagccacttgagtggatgacttcaccttaaagctattgattccctaagtgccagacataataggctatacattctctctggtggcaacaatgagccattttggttggtgtggtagtctattattgagttttttttggcaccgtactcccatggagagtagaagacaaactcttcaccgttgtagtcgttgatggtattggtggtgacgacatccttggtgtgcatgcactggtgagtcactgttgtactcggcg

SEQ ID NO: 179 - DNA, 104 bp, synthetic construct
  source 1..104: mol_type = other DNA
ggacaacaagcaccttcttgccttgcaaggcctcccttccctatggtagccacttgagtggatgacttcaccttaaagctatcgattccctaagtgccagacat

SEQ ID NO: 180 - DNA, 80 bp, synthetic construct
  source 1..80: mol_type = other DNA
ctcttcaccgttgtagtcgttgatggtattggtggtgacgacatccttggtgtgcatgcactggtgagtcactgttgtac

SEQ ID NO: 181 - DNA, 184 bp, synthetic construct
  source 1..184: mol_type = other DNA
ggacaacaagcaccttcttgccttgcaaggcctcccttccctatggtagccacttgagtggatgacttcaccttaaagctatcgattccctaagtgccagacatctcttcaccgttgtagtcgttgatggtattggtggtgacgacatccttggtgtgcatgcactggtgagtcactgttgtac

SEQ ID NO: 182 - DNA, 184 bp, synthetic construct
  source 1..184: mol_type = other DNA
ctcttcaccgttgtagtcgttgatggtattggtggtgacgacatccttggtgtgcatgcactggtgagtcactgttgtacggacaacaagcaccttcttgccttgcaaggcctcccttccctatggtagccacttgagtggatgacttcaccttaaagctatcgattccctaagtgccagacat

SEQ ID NO: 183 - DNA, 16 bp, synthetic construct
  source 1..16: mol_type = other DNA
acgtaagcgcttacgt

SEQ ID NO: 184 - DNA, 12 bp, synthetic construct
  source 1..12: mol_type = other DNA
gtaagcgcttac

SEQ ID NO: 185 - DNA, 43 bp, synthetic construct
  source 1..43: mol_type = other DNA
aagagatgagctcttgagcaatgtaaagggtcaagttgtttct

SEQ ID NO: 186 - DNA, 43 bp, synthetic construct
  source 1..43: mol_type = other DNA
agaaacaacttgaccctttacattgctcaagagctcatctctt

SEQ ID NO: 187 - RNA, 34 nt, synthetic construct
  source 1..34: mol_type = other RNA
accttttgtcggccttttgtcggccttttgtcgg

SEQ ID NO: 188 - DNA, 38 bp, synthetic construct
  source 1..38: mol_type = other DNA
tcggtccgacaaaaggccgacaaaaggcggacaaaagg

SEQ ID NO: 189 - DNA, 38 bp, synthetic construct
  source 1..38: mol_type = other DNA
accgaccttttgtcggccttttgtcggccttttgtcgg

SEQ ID NO: 190 - DNA, 117 bp, synthetic construct
  source 1..117: mol_type = other DNA
atgggagtagaggcgggcggcggctgcggtgggagggcggtagtcaccggattctacgtctggggctgggagttcctcaccgccctcctgctcttctcggccaccacctcctactag

SEQ ID NO: 191 - DNA, 15 bp, synthetic construct
  source 1..15: mol_type = other DNA
aaaaaaaaaaaaaaa

SEQ ID NO: 192 - DNA, 25 bp, synthetic construct
  source 1..25: mol_type = other DNA
cacatacacacaaaaataaaaaaga

SEQ ID NO: 193 - DNA, 16 bp, synthetic construct
  source 1..16: mol_type = other DNA
gaatatatatatattc

SEQ ID NO: 194 - DNA, 618 bp, synthetic construct
  source 1..618: mol_type = other DNA
gtgaacaaccttatgaaatttgggcgcataacttcgtatagcatacattatacgaagttataaagaactcgccctcaagggttgatcttatgccatcgtcatgataaacagtggagcacggacgatcctttacgttgtttttaacaaactttgtcagaaaactagcatcattaacttcttaatgacgatttcacaacaaaaaaaggtaacctcgctactaacataacaaaatacttgttgcttattaattatatgttttttaatctttgatcaggggacaacagtggttgataacctgttgaacagtgaggatgtccactacatgctcggggccttgaggactcttggtctctctgtcgaagcggacaaagctgccaaaagagctgtagttgttggctgtggtggaaagttcccagttgaggattctaaagaggaagtgcagctcttcttggggaatgctggaattgcaatgcgggcattgacagcagctgttactgctgctggtggaaatgcaacgtatgtttcctctctttctctctacaatacttgcataacttcgtataaagtatcctatacgaagttattggagttagtatgaaacccatgggtatgtctagt

SEQ ID NO: 195 - DNA, 84 bp, synthetic construct
  source 1..84: mol_type = other DNA
tactccctccgtttctttttattagtcgctggatagtgcaattttgcactatccagcgactaataaaaagaaacggagggagta

SEQ ID NO: 196 - DNA, 84 bp, synthetic construct
  source 1..84: mol_type = other DNA
tactccctccgtttctttttattagtcgctggatagtgcaaaattgcactatccagcgactaataaaaagaaacggagggagta

SEQ ID NO: 197 - DNA, 28 bp, synthetic construct
  source 1..28: mol_type = other DNA
acacgtgacacgtgacacgtgacacgtg

SEQ ID NO: 198 - DNA, 36 bp, synthetic construct
  source 1..36: mol_type = other DNA
ttatttattttatttattttatttattttatttatt

SEQ ID NO: 199 - DNA, 36 bp, synthetic construct
  source 1..36: mol_type = other DNA
aattttaattttaattttaattttaattttaatttt

SEQ ID NO: 200 - DNA, 36 bp, synthetic construct
  source 1..36: mol_type = other DNA
tctctttctctttctctttctctttctctttctctt

SEQ ID NO: 201 - DNA, 92 bp, synthetic construct
  source 1..92: mol_type = other DNA
attaaaaaaataaataagatattattaaaaaaataaataagatattattaaaaaaataaataagatattattaaaaaaataaataagatatt

SEQ ID NO: 202 - DNA, 92 bp, synthetic construct
  source 1..92: mol_type = other DNA
agatctaggagactgacatagattggaggagacattttgtataataagatctaggagactgacatagattggaggagacattttgtataata

SEQ ID NO: 203-209 - skipped (7 entries)

SEQ ID NO: 210 - DNA, 12 bp, synthetic construct
  source 1..12: mol_type = other DNA
gtaagcgcttac

SEQ ID NO: 211 - DNA, 40 bp, synthetic construct
  source 1..40: mol_type = other DNA
gccacgtgccgccacgtgccgccacgtgccgccacgtgcc

SEQ ID NO: 212 - DNA, 44 bp, synthetic construct
  source 1..44: mol_type = other DNA
aaaatatttataaaatatttataaaatatttataaaatatttat

SEQ ID NO: 213 - DNA, 36 bp, synthetic construct
  source 1..36: mol_type = other DNA
cccgccaaacccgccaaacccgccaaacccgccaaa

SEQ ID NO: 214 - DNA, 36 bp, synthetic construct; identical to SEQ ID NO: 199
  source 1..36: mol_type = other DNA

SEQ ID NO: 215 - DNA, 16 bp, synthetic construct
  source 1..16: mol_type = other DNA
gaatatatatatattc

SEQ ID NO: 216-234 - skipped (19 entries)

SEQ ID NO: 235 - DNA, 2705 bp, Glycine max
  source 1..2705: mol_type = genomic DNA
ttttcttttgttcccaatttagaattgataattttcatcttctaatttaaaaatggaaaatatttgataaacattcaatttattatccaactcttaaagaaagaataaaaaaggaaaataaaataatagatatatgatataatttatgatataataaaaaaagagaaatagagaaaaataaaataaaaatatttgtgagacatttaaaattaaaagatgaattatatatcatgattagaaagacaaaaatatcactttcaaattttaagaataaaaaagaaaaaataaacataaatttaagagataaaaataaagtatttaagtcttatttaatatattaattaaaaatacaaacgtgtataataatcttggatgagtccaaattgacgtcttttcttatagtatttctttgatctatcattttttttcttttcttttcttttttttttaaaaaaaaaagtatcactgttacccaaattccacacaatatatcgtatgactgtgtcaactacacatgacataacatattaactccctcttttgtccctcactcactgacacccacacgcacacttttctcaacactttcctctttcattttcggaatcagtcaaaacccaatcacaaggccccccaactagccaaccagctggctcctcacaaccatgagctcacaatctcactctcactctccgtgttgcctttttatatatatatatatatgcttccctcacttccctttatttattatatatatccctcactcactctatctcttttctccagcagcaccaaaaccacccaacactcgaactcaatatccattattaccaaaaaaaaagaaaaaaggatatcaaacacccttttcatcattaaaactctcagttccctctttccctatcaaaaccctttcccacaacactactcactccagtacaagaaaccctttttcaatttggtttcaacagcacacacacacacacatatatatatatatagcatgtttaccttgaatcattcttctgatttgtaccatgtttcccctgagctctcatcttccttggacacatcctcgccggcttcggagggctctcgtggcgtggcattttccgacgaggaggtgcggctggcggtgaggcacccgaagaagcgggcaggtcggaagaagttccgggagacgcgccacccggtgtaccggggggtgaggaggaggaactcggataagtgggtgtgtgaggtgagggagcccaacaagaagaccaggatttggctggggactttccccacgccggagatggcggctcgggcgcacgacgtggcggcaatggccctgaggggccggtatgcctgtctaaactttgctgactcggcctggcggttacctgttcccgccacggccgaggcaaaggatatacagaaggcagcagcagaagctgcccaggctttcagaccagatcaaaccttaaaaaatgctaatacaaggcaggagtgtgtggaggcggtggcggtggcggtggcggagacaacaacggcgacggcacaaggggtgttttatatggaggaagaagagcaggtgttggatatgcctgagttgcttaggaatatggtgctcatgtccccaacacattgcttagggtatgagtatgaagatgctgacttggatgcccaagatgctgaggtgtcactatggaatttctcaatttaataatgtgttttggtttggtttttgttgttagttttttggagtgaacagtgtctgtactggttttttattagtagtacggatactagttataggtggaaagattgcgagggaccaaaaggaattttcttttgaacccttttttgtcaatgtaatcaatatcacgtatatcatgaagtgaatcccttcaagtttatgtataaattaaataaaagaaaaatctagttttggttatgaatctttgttaaagtaaaatatcaatgtgagttgagtatgtgaagtgtgaaccttaaacttgatacaactcgtggtagatcattatttatagttcttttttgccaagtgtacgtacgcggagcccataaaaaaactaggaccacactttatccatgcagattatagtattagttttttagtttgaaaaatgtagataagaagtatatatagttatatatctctttctcctgatggattggatcaaattatttagattttgaaattgttaatcatctcaacagtccttcaagtcttcacagcttcaagtattttgaaattgacacctgagcctgcaataattgaagaggatttgcttggacatagaaagtatgtcttgaactttcctttagaaaccaaaaatctcattctctcacaaagaggagccacgtcgccaacttgaacacgttgaaccgcggtttgatgacccgttccctcttgaaaacagccaaaaccatgttaccaattgtaacttattctatattccttagaagaagctactgataacttgatgaaaattatccacctaatttataaacttctgggtaccttcaaattacttaaataaacgccaatatatatccttttagcattttggcttttataaaatgttcattgataaacattttagttgacttttgatatacagtaaaaaaatatatatagtattaacaaattagaaatctccttaaacaattcttgtaaaatttaataatcttcaattacatga

SEQ ID NO: 236 - DNA, 2896 bp, Glycine max
  source 1..2896: mol_type = genomic DNA
tgtgaggggttgtgtcggccaccttcgaatttatctcttcatggaagctccgcgtggcggctctatcccatgacacatgaaaaactcattctctcgctgcacataattaatattttgcttcttcttcgccctaattgctaatataaaaattaaatactcttatgttttaaaaatataatacactacgtatatttttttattaagagtttaatagatgcagattatcgatataaaactgtcagccaatcatattcttcgtaggtaatatgaattttaagttatttattataaaattccatgaattaacgattctaaataacagtgtaataattctatacactgttaacacatatattagcttaatttatagagtaaataatgcactaaacagtataacgagaatctatattatcatttaataataaattaaagctattgttatgacaaatttattaatttttataattattttaaaaactatacgagtaataatttttaattagttgaaaaattgaaaaaaaaatagattaataatacataaaatttaatattttaaaaactaaattaagttttctgtaagttaaaattaatactatatttttactttctataaatgttttaataaacacatgaattaataaaattaatttatgaatatacaaaattaaaaatataaaaaaaatacggtcaatcaattaatttgtgacatgagatagcatagtagtactataaaaaaaaaaaacctttcaactcgatctaaattaatttgaacttttattttacttacataattttcttttcgtatttcccatatactcccactcaagtcatagtagtcaatggtcattttccatcttcatataaatagaacgaatacacccacaacatcgttctgtgggtaaacaagtgtttcctgagtctgaacggaatcccacttaaaagtcgttctccttcctcttcgcagctgttatatagtactattttcatttcatatgtttatgcacctctatatatacatagacacatgtaaatggttgcaaaggaagataagataggtaccagctatcacatagtttatttaatccgttatatgccacctgatatataggcatattagctagttaggtaggtatagtagtttaagttaattcaaccatggaagacagggatcactgttgttccaacaattcaacgatgatcacaacaacaaagaaaagaacgggtagaagaagtccaacatcggataagctcaagaatcaacaccgcgagaagcagtcgatgaaaccttaccgtggaataaggatgcggaagtgggggaagtgggtggcggagatcagagaacccaacaaaaggtcgaggatatggttgggttcttacacgacacccgtggccgccgcacgtgcctacgacaccgctgtcttttacctccggggtcccaccgcgcgccttaacttccccgaactcttgttccaggacgacgaccaggagggcagtgattcggtgcagcacggcgcagcagggaacatgtccgctgattccattcgccgaaaagccacgcaagtcggcgccagagtcgacgctctccaaaccgcgcttcaccaccacgcgccaagtaccaactctctcaatctcaagcccgacttgaacgagtttccaaaactcgaagagcttcaagattgatataaatcaaatatcaatatcaatcaatatatttaatttcctaagttctttattaatatatagttttatgtgtgtatatatagatgatgatgcctcggagttggggcttgaaactaattaaccccttcccttccccttaatttagatatatcccttttcttgtttttccgtatcttcaatcataatatcaaatcaaagaagtattattattttctagggtttttgctaattgatatattattatcatatggttttgatacggtgtaacgtaacaattactaacatattaagtggccagtattcgtggtgagatagaaagatgtttcatgattcaatattattcttcgttgagttcactgttttgtttggtgctggagaatatatctttttcttcttcttctttcgtgcaaaaggggaaggaggagttaagaatttccgttcgttcagattctttctctttaatttatgggcttgggtttttgtgtgaaaagattattcgctttattattaaatgttatcttgatgattcggtggatctaattaaatacgtgaaggcgcaaatcttgagtgtggatattaaagatgggagcagctagcggtggcccagcgtgcgagggacattaaaaataaacaggcaaatacaaatgttcagtttgccgaagtggataaagtgataaggcagagtagaagcaccacaagaaagagaagtagcttcttgtgaccaggtggtggacaccacacaaaaagaatataaaagagttggtgtattgtttatactattttttaaaaatattttttccttctataataattttatgataaataatatataaacatttattgtataaatttttttaaaataagaatggtcaagactactcgcaagagggaggaggctagtgtatctcaatatctcacttctcacagaaagagtgagagattgtcgtttgtcattgtcatggaaaagttcagcttacagatggccttgtttatctgagattgatatacaccgttggtataagaacgcaattggcttctttaatttgttatttgtgttgttgaaataataacttctgtctttcatttctttttgagaataaataaataaatttaatcttaaatttggtgtaaaatatatataatttgttctcagagttaaatgtaatatttctagttagcatgagaatgatccgtatatatataatgttatcttcca

SEQ ID NO: 237 - DNA, 4186 bp, Glycine max
  source 1..4186: mol_type = genomic DNA
ttaattttaaaaatatttatatcataattaatttatttactttttaaattgtgaatttaaagttcacagttttgtaaattgcaattattttccaaaattttacgcatcagattgttttatactaacattttttaaaataaaataaagtcgtagtgggacctcaactcaactgcaccttctagaaaagggtacaaaatcaaagcatggaaattatcaaattaccccctggcttgccccagtaccagtagtctcgttccactttcggcctccctcttccgtagacgcggtttgccacgtcaagcgttaccttttctttattcatactaatcgccatgcgttactccacctaagtaaaaaaaaaaaacgataaataatgagattacctttgaatatttaatattatatgagattatattaaatatggtatagtattatttaattgttttataataaattaaataaatttttatttattgtttgaaaaaatggaagaattatatttttttctaaaacaagaaaggaagaataatttaacctatttaaatagaacataatattaaacattagttatctccatatttcattaaaatattaaaaatagaaaacaaacatatttaatatcttaatactaataaaaataataactaaattgattaaatataatgtgtataacactttgatgttcaaatttttatgagttaaagaaatctcaacactataaagaatacacaatatttttactcaataataattaattataatagaagaacttaaaaaaaatattctaacatttaatataatttccttccacccactttccttacatcaaaaaatcaagatgatgttacggggaagaattccaatttcatcctttgacaattacacgcgcaaaaaataatgtcctaccccttcattaacttaccaggaaattgcacacccctcatctatctttatttaatacttgtcttctctcttttccaaccatctcttgctgcttcactcttcttcaattcatatcatatcaattagatttagagctaaacataaaattgttttcacataccatggacaacaacaatgacttttggaaattcagtgaccagttgaggcttgaatctggtttggccaatctgtctctgaatgattattccatttggagcaacagctacagctccaagaggcctgatcagaggaggaactttgatgtcaagggcagtgatttcaacaacaacaacaactcatcaaaggcttttgatgatgatttcaatgatgggtggaagatcaccaattccaatggaccccttttctctatgcctcacaacaacaacaacaacactcttgaagttggaggcttcaacaagggaggaggaatctattccaacaccaacaccaccatttcctcctaccatcctaataaccttaacaacaacgcttttggaggcttcaacaagggaatctattccaacaccacatcctcaccctatcttaacaacaaccaccaccacctcgacgacaacaacaacctcaacagaaataatctcaagggctacaagacatattttaagggtgaagatcagtttcacacacccaaaagtgccaagaagaagaacaccaccaacaacaccaacaacaagaagcatggggacaacactaataataatgatggcacaaagactggtgctgagaagaaattcaaaacacttccaccatcagagtctctgcctaagaatgaaaccattggaggctacatctttgtttgcaacaatgataccatggcagagaatctccaaagacagctctttggtgtgtcccctctccttttttttttcttcttgttttgctctctttatcaaatcttatttttcctttaatctaattcgcggttctctatattttcaataacaataagttgaatcctttgaggaattgatatgtcaagaaattcttcctttctaattctaaattgattttgctgacagatgtttcttgtgctttgtaggtctgcctccacgatacagagattcagtaagaacaataactccagggttgcccatttttctgtacaactactccactcaccaactccatggtatctttgaggtatgtgtgcgtatattttcttttttttagtctgttgttgcatcactttaatttgatgaaaatgcttttgtttttggacatcaagctatggattaggccatctcttttacctttagcagctatggtctaattaaaggcaataataatgattaaatgtttggtggggtttgttcaggctgcaagttttggaggatccaatattgatccaacggcttgggaggacaagaagtgccctggtgaatctcgtttccctgctcaggtatatatcatctcatctccaatcaaattaattttattatatctatgcacaaattatgctaatattaattttataaatttaattaaaatgtactgatgctgtaaaagtaaagttttatattgtccttcaaagtaaagttttatattgtccttcagtcaattgatatatcacatatcaattgaatgatttctgattaaatggcaatattgacggtacatgatgattaaactctaattgtattattacttgattttgttataaacttatgaattttgcatacatgatggttacaggttcaagtgattactaggaaagtttgtgagccactagaggaagattcctttagaccaattcttcaccattatgatggccctaagttccgtcttgaactgagtgtgcctgaggtatgcatcaacttgtggaatatgttactgatccttatggtagatgatgtggtcaactaaattgcgtcctattttttttattatttcaggcactgtctcttctggatatttttgcaaaccagaacagtttcgatgacattttcaaagccattccagcatagaagggtagaaattatacaagaagagagaagttacaaggacaatggataatgaatgaatactgtggattcatattattagagtgtcagaagataattaagacaacgaatattgaatttcagccgtcatatatttgtgttataattactactataatgttatttgtatagaggctgttatgcctggttgcccatttttttcttgttatgggtgtatatgaacatcacataaaagaatacaataagaaggaactaactttgttcatgattttttctgcaaaattacaaattcaacggaatggcctgcattttgtagcttttagtaattgctgggattgaactctaggtgaaataaatagtgagtgcgagcctgtgaggccctgctttaaatgtttttcattcaaaggggagatttgatttattggttcattttggggcattaacatctctgctttaatctttgatatttgcaaactatgtttgagttttcgttggaagatctatttatacatcattaaagggtaatactgatacatatgagtatggttaattttaaggggacatatgattttctgtaatgcctcatatcaattataccacaataaaaggaattcagagattatacaattagaataattttagaaaaataattgatattattaatattcacaacttgtatctactttttataatttatcacctaaattttttataattaaatgtgtttgatttaaaataattacagaaaatttgacccttggaggttacctatttcataacagtgaaggttacctatttataattgttccaagtgaagcatgtggttcgtccggttcttacacattcaacttggagtgtcaattcaaatgttgatggttttgtgtatggctcagtagataataggtagaggagcaaatgaaatttatttcaaatgtgggataattagttaggcaaagctgctacatcagacaatgccatttgataagctggcgttgccttaacactaacaattgcataaactaaaaggaagcatctggctctaatttgaccaaaaaattggaccacagtaactaaactatatataaaactttcagcataaataaactaaggatatttttactcgaggctttgtcttcactctaattctttggttattggttattttttacaaaatcgttgatgaataatgattaacactcactttattacgctttattgggtagagggaagagaattgtgtagagggaagagaatagagcagaggg

SEQ ID NO: 238 - DNA, 6841 bp, Glycine max
  source 1..6841: mol_type = genomic DNA
cttaatctgtgataggttgaagcatatgaatgattgttgaaccagatcttctaataaagttcccaaccacttgagcataaatcttaaaccctaaattaaaattttacaaataaaataatgaaggattaaatttgcaaaaaaagggcaataaattcacgaaattgagaaaataagaatataaaaataaattaaatttaataactatcagcattattttttattatttgtatgtggaagtgggccaaaatggacgacttacatatactagtggccaataggccacaccacggtccatactgtgagatcagaacaatgcacctacacattggccattgtacatgtagcagatgtgtaagatattacaatgtttacatgaatttaaacattatcatattaaattattattaatttaatatttatcataaatcatactgtatctcacactgtgaattttatccttttttaaataattactctctccgttactatttatatataagaaccaagggagtaaaagtatataatataacatatttagtgttcttgaatacattaaataatagatttttaaacaattaatattcaagccaagattaatccatgatattcgacatcaatatcacatgtcaagataattttaaaaaataatagatttattaaattttataaagataatttaaaaaactaaaatagtaaaataatattttctccattctaaaataattatcaattattttacacaaacaaaaaaaataataaatttatatgatcattcatattaatattaatatataaggaatataaataaaaaataattaaattatattaaaaaatgaattgtattcgaaaaaaaaatattttcttatacgttagacggaataatacacagaaattaaactaaaatcaatgagagatggtggtggaccaaatgcattaatacacgtgcgcaccaacctcttcccttcccttcaaattcaatcaatcgatttatcgctcttttatgtggttggcttcctttcgctctcttctctgcaaatgcttcattccaaggtatgcttccttttgtttaatcaatatccgttcgtttattatttattacaccctttgtgctctgatgatttttgtgcatgtgcaacttctcctattttacgtttggactggtattttattgcaaattgttagcttattttcaattcattgagatctgatattattattcagtggattcacaagtaaagtagtaattgctaactcgtagagagagaaaagctaatcagaaagtgagaaccttttttaatagtaaaaaaatgtaacaaataaaaaaaaaaaatcagcatgagagagaattggcacagaacaatagagttttaccttgaaataagtcatttagatgcagtttacttcaaaatatgtttagtatgaatgacattcattgagattcgtaaacgcagatggttaggactctgtaggctgataaagacaacactcataccgttggaaagaaggatgctgctggccatgttgcttaatttagttcttgcttcctttgtcttcttgagttttatcagagacgggagtgcagggatcactagctctttcattcggtcagagtggccggcagttgacatcccccttgatcatgaagcatttgcagttccaaagggttataatgcacctcaacaagtaagtctttagaagagtaacaaggctgattttattatctattcgctaatagtatttaatgaaactttgacaaggatcctactcctcggaaaccaaattggacatgtgaagcagtttcaagttctaaatctattcctttattccaatgaagctcagctgcattgattgattcctctgtaggtgcacatcacgcaaggtgactatgatggaaaagcagtaatcatctcatgggtgaccacagaagagccagggcacagccatatacagtatggcacatcagagaataaatttcaaactagtgaagaaggcacagttacaaactatactttccacaaatacaagtctggctacattcatcactgtcttattgaaggccttgaggtaattgtttaatcaaattaagtaagtagaaatgtagaataatcaacacgtgcattatatttgcaatattaaaaataaaatcaattgagaactgaaatctaatgcacgatatgcaatatgttttcattttttagataatcacatgtgcttttataattctcatcttgctgtgtgtagaatgtctttgtttagtttaatcaatgatttccccatttcagtatgagactaaatactactatagaattggaagtggtgattcttctcgagaattttggttcaaaacacctcccaaagttgatccagattctccctacaaatttgggatcattggtaagttatctgttattcaatgtttgttctactagaaaatagttttttgtatccttaattatagactctttctatttataatgcacaaagtgtctatcaggatttcgttttgctttgatttcccatgatttttattttgtagctctcacaaatgagtcattgcataaatattgcaggtgatttggggcaaacgtttaattctctttccacccttgagcattatatacaaagtggagcgcagactgtcttatttgttggagatctttcttatgctgataggtaccagtacaatgatgttggtttacggtgggatacatggggacgatttgttgaaaggagtacagcatatcatccatggttatggtctgctggaaatcacgaaatagactatatgccttacatggtaatgtggtaacctgagtataggatgcgtcttagttattcgtgttgtactaaatcatttatagaatgaaatgaattcatcattttctggaacaataaaataataaaccaccatcatggtttcagctttccgttttctctttttcgaattggaagtataagagacatgcattttttattcttctaaactactatgtctggactggtttgttcctttttttggattatgcatggtcatctgcggaatattacttagctgactttcaactccatcaaactatttggttcaaactagatgtcttcttttatatgcatcttattttttatatagtttttgtagcaaattccatgcaattcctttagaactttgtttataatgtttagattaagatatcctaaatttcaagtggcaaataattacttgttttgtacataaaaagtcatttcttattttgttggtgaatggttatcccgatgacagatgctgaagtaaatgttcatgagatttgttgtaataccatgttgatctttgagaagtttcattcagtttatgattttagtctttaacttgcttatgttgaaaacttcatactctttgcatttgatgttaacttgggtcaaatatgcttggtcagggagaagttgttcctttcaaaaactatctttaccgatatactactccctacttggcctccaatagctccagtcccctctggtatgcagtcaggcgtgcgtctgctcatataattgtgctatccagctattcaccattcggtaattaatctcctctttatctacttattaatattccttacatgttgagttgaaagagaagaaattgtttttattcaatcttattcggggttacaacatgtgtgctcctatatatacaatgtgggagttttgattgcatcaatgtttgcaatgaaattctgatgctatgccgagacacggtcagtacaaacaaagtgagaaataggatgcttgacacaaccccaaaatactatattctatatgaagtttaggttcatagtgtttcataaccgtaaaaagttggtgtgcaatggcattaaagtctttacattctatatttctattattcttagtaactttgtttctcttgttagaaaaactatacaagtggagagagaaaaagttgtcataagagaaaataatgctttttcacgggatacaaattttattattgtgtgtttcacaataacagtttctttacgtttcattttcagtgattgctgataaacaaacagaaatgaaggaaaaatatcctaaatacaagcaaagttgtcctgttgaaacagggtaccaatataagcagcaaacatttatttttacaaaaaagtaaaggctttgacttctctacattatgactcaagtgccagtttgttaggaatggtggagagcagcattctggtgtttctaggtcttaagaatgttagatagtgttacttagagctgtatccatttcggttgaatagtcactgccaattatgtatgcttgtcaactgccacattttgttgtgtatttggtcttttgaaaattttctctgtttccttttatggtatttttcgtaatagttatctttcataacagtgaaatacactcctcaatacatgtggcttaaagaagagctgaagcgagttgagagggagaagactccttggctcattgtgctcatgcacgtgccgctctacaatagtaatggagctcactatatggagggtgaaagcatgcgatctgtttttgagagctggttcatcgagtacaaagttgatgtgatctttgctggccatgtccatgcttatgaaagatcagtatgtttttcactttctgctcatttgttttggtcctctcacaacccagacaatatgtttcaataacttgtttgttatcttggtatcaataacttgagcaagagcaatatgtttcttcagtcatctgatgtcacggtggattcttatgtgttgaatttttctgtcctggtttcagtatcgatactctaatgttgactacaacataacaggcggtaacaggtatccattacctaacaaatcagcacctgtttacataacagtcggagatggtggaaatcaagaaggtcttgcttcaaggtaaattaaacaaaccatatctaaaatccttcttgaatatgattatgtcaaagatgtcttgtcatataggttttaattctatccttggtcatgcaggtttttggatccacagccagaatattctgcttttcgagaagcaagctacggacattccacactggagataaaaaataggacccatgctatctaccactggaatcgcaatgatgatggcaagaaagtaccgactgactcttttgtactgcataatcagtactggtaggttccctccaccttttgcttgggcattgctttcaagtagcagggagaaatatgccatatcttgctgttgtgatgaactataagattgaaagttatcattgcatccaaatggcaaggcacaatatagacattctctgccacatgcgtttttactgaagataataatgctagaagtttaaaatcgttatggcctacattccgatagtaattttgagggttggtttttgtgatattttcttcttcgtaaatgttgagaagggtacaaagaaacttccttaagagaacctttgcttatctggtgcacaacactaaaaaaaatctctcgtggagactaatagaagacttaaaccccataagttcgaaacttggagcatgtctagctcagggaatataactgctaattgattactgattacataataacctgcacacagtagattttggttgacaagaatcacaagataggcatgtagcctggttaagagtagcctgtcactctatttttcagagatatataaatcaatgatgcaatttcttgttctgataattgcaatccggttgggttctgataatgcatgcaggggacacaatcgcagaagaagaaaactgaagcattttctattgaaagttattgatgaagttgccagcatgtaatttgaagttgaagcactagcatatttggcgttttgaaaaggataaaaatgtgccccttgattaatatatgcagttcaatagtgtctgagtgagcgaaatgcaggacgttggaaatggttctatgtactatttggcttgtatgcttgtattacaacgctaataagaatattaaatgagcttgctggagaaaaataaaataagaacatattatctattgattggaaatggttccatttcagtgatttatttggcattgttaaattagtaggggttgcaaatccatccatttatccatcatccattcaatccatccacaagctaatccattcaattcgtccattgcaaaaaaaaaaaatgaatataattcaattcatccatttattttatgaataattaatgattcatccgttttttttaaaaaatttaacagattctctaataaatacgtaatagatcaaaattgatctgacttaataattaaagaatttgaggacagttttcaacccatgtaggtcaagaattagagatagttacatcgtgatactttcaaattcattatatactcaactctatttctcactcgaaccttgatcttatattctcaatttctcttcaatttggttgctcttttactttgttcttattttttagtaattacttatctctcttttactaacagtatccagtcacaagtgggatttgattttgagataatagttatcaaggatgtaattgacttgttgcaatatttaatagtacaatttaaagtgctactccatttaataaatgccagataatttgttctgaatacgggaaacaataagagcatcaaaactacagctaaaagacaattatccaaccacgagctgttaattttacatcccatcatcaatggagcatttataggataatctgatagagaaattcatatatccttaccattattaccatgcctgacaagacgtatgtacatttgctaactgtaattgctattaagata

SEQ ID NO: 239 - DNA, 3494 bp, Glycine max
  source 1..3494: mol_type = genomic DNA
atatatatatatattaagaagaagaaaaaaagcgcaagagcatcgatcaaatgaacgaataatgctcaattttcttttattaaaagtataatttaatttatacatattgtatgatgtaatattggtataaaatatttaacatatttgatgataaatatttactaaaaataaaaatttgtatgattatctttatcaacacaattttttttccattcataaaatttgaatgtgactttacttaagagattcaatataattaactatcatcaaacagcttcctggtatatgaacatgcaggctttttctttgtaatctgaggggtatttcttatgcctcatatgaatattattctctctttgccgtttcagaaaaaaaaaaaaaaacttaagaatatacatgcatatatatatatatatatatatatatatacatttatcttaaatatatattttaaagtaattattataaaaataaattattttataataaagaaccatctatgatcaaataaatgatatatataacttgaatttgcctgctgttagataatttaacaactaattaactgtaagtaatctcagttccttaccgctagaaaagttaacatttaatgttctgacacattcagaatttgttatgtacgtcctttacattacacccaatactttatctttcaaaatgagtttctcacgttaaaaaaaaaaaaaaaaaagttgcatccaacagactttaatttgtacaaaatgcgttttgattattaaattctaaaaaattaacctacctgattgttttttttaaaaaaaaaatatgttcaaccaaattctattgaagattaaaaaaaaagtagacaaaaaacataaaagaaaataacattctggactagtaaaatgaattattggaccgtaaaaattagcttattacagttcagaaatattttatcctctatgcagtaggcagaggtattgtctatttaaagaagcaaatcctcgatgaggaaagtgcacaagtgagtttgttgatcgagataactagaaacagtgtgatgaaaatgaaggtccttgttttcttcgttgctacaattttggtagcatggcaatgccatgcgtacgatatgttccctctccgaatgaacactggctatggtgcccgtactccggaggtgaaatgcgcaagttggaggcttgctgtggaagcacacaacatctttggctttgagaccattcctgaagagtgcgttgaagcaacaaaggaatacatccatggcgaacaatatagatcagactccaaaacagttaaccaacaagcttacttttatgccagagacctcgaagtccatcccaaggacacatttgtgttcagtatagatggcaccgtactctctaatattccatactacaaaaaacatggatatgggtattatgctcttagttaattttcttctaatactctctttttccgtttttgctattactaggttactcccttatatgcgcatcatttattttcaactatttttggtattgatcgagtttcggtgtttggcccgactaacaacattaaggtttctcatcacatgcatgtagatttgaaaccttcattatatatgacattttatgattagatataatataaagaaaaagtttcattgtgagtgcataaatatatatatatacagacacaggcacatacatgctttcaggatcgtgttcattgttcttaatgcaatattttatgtgatagggtggagaaatttaactcgaccttgtatgatgaatgggttaacaagggcaatgcaccggcactgcccgagactcttaagaattacaacaagctggtgtctcttggcttcaagattatattcttgtcaggaagaacactggacaaacaggccgtaacagaagcaaacttaaagaaggctggctaccacacatgggaaaaattaattctcaagtcagttttcttttttctctatactatattctcaagtcaattaattctcaacgttgcaccaaatctgccaggaaggaacagtttatagataatcagaaattatataattattttaagtacatggtgcgatatgagtttgaaatactagtagctaattggatctatttttggttggtgcagggatccacaagatccttccactccaaatgcagtttcatacaaaacagcagcgagagagaaactgataaggcagggatacaacattgttgggatcattggagaccaatggagcgatctcctcggaggccacagaggcgaaagcaggacctttaagcttcctaatcccctgtactacattcagtagttccttcacctctcaacaatctagcttgctcctatctatctatatgtaataagatgcgttcaaataggggcactagcttcactttatgttgtttcagctgtgtgtcaacaagtcatgtaagagacttcactatgttgttttctctttcgtggctttaataaattatgcgcccttgttccatactttgatcttttcttttcttttctttttctttttaagtcaaagtaattcattattatcaaactaatgaaaaatactaaccaatatcctaagagaattggttaaagaatttaaaataataatatttttattaagagacacaaaattatgttatttataaattttttttattttcatataacttacacaattaatatttttgtcttttagttttataacaaatgtcttaaaaacactaattaaaaagattctttaaaaaatagtcttaagaaaatctgaggaacttagctaggttttacaaactaatataaaatgtgaattaaatatattttttccatttaataatttagtattttttttcatccattacattattttgaataataaaaaatattataaagtgttttaaggatgaaaaataaaagaatatattttaaataaaataaaaaagaaatttgcaggaaaaaaatatctaaaagataaagattttataaaatcgagatcgggaaagaagtgcacaaaatcgacgtcgtgaaagaagtgcacaaaatcgacgtcgtctattacaccatataattacactgtgaaccgacagttggtattaacacaatggcccaatagagtagaccgagaaataattatctgacaaatatactgttcactaaaaacaaaaaaatgatgagaaagcctgaaaattacactatatatatatatatatatatatatatatatatatatatatatatatatatatatatatgaaatataataactttatactatcatttaattaaaaataattatttaaattattttaaaataattattttaaaaatcaataaatttatcatacataataaatatttaatataaatattgattaaatgattatataaaaaatttatactatctttgtataatccttttttcatataaaaatattagtgaatggtgttttgagtttcaaaattttataaaatttcgttttaatttctaattt

SEQ ID NO: 240 - DNA, 4341 bp, Glycine max
  source 1..4341: mol_type = genomic DNA
aaatattttgaatatttcaatatcaaccaatttaaatatttttttaaaggttaaaattatagtcattttggaacatagacagtaatatggagctagagttatgttaaatacaggtcagaaaaataaaactcatgaaaatttgtaaaccaacgaaacttacaataagttcagcagtgatcttttgtctcatttttttacatttctttagtctctttattttttggttaaacgttgctttttagtttattatgttttagtaatttttttttactttattacattaaattttaaaatttctattttgttttttttatgtttttgaaaattttattttgttaatttttttcataagaacactaatacttagaaaagaataaaaaaaaaaaaggaaagttcgatggaattcaagctcatgaaattttatgttaaaaacatgagtaattcattaatattttaaaatttaaaataaaaaaaaaaaggaaagttcgatggaattcaagctcatgaaattttatgttaaaaacatgagtaattcattaatattttaaaatttaaaataattaattgttttacttatattaaatagttggtgaaaatttaaaaaaagatgcacgtttaaacaaggttggaatcgttttgattttaatttcaccactcgagtgggatgcacatttagacaaggatggaatcgtttgacttggatttggttactccttcccccaacacgctgccaccttctagggaaggtaagggaccgagtgaccgataacaacaccgatttccaaatatatatctcattcctaagctcacacacatcttttacgttacatttcattattagatgctttcaatcgttaagacacatgtcaccaccaaaagagcatctcataacaacgtgtcacacctcccaagcacacgtgtcactcacaacacaaccctcacctatatataaattatcaaaccctccttccattcctccacatctcaatctcaatatctacacaaaagtgttccacttgagtgaaaagtagtgtgttaagaactaaacaatttttcaatggcgtccaagaaacaagaggagcgagctgaggcagctgcgaaagttgctgccaaagaactcgaacaagtcaacagagaaagaagagaccgtgatttcggtgttgttgctgaacaacaacaacaacatcatcaggaagatcaacaaaaacgtggtgtaatcgggtccatgtttaaggcggtgcaagacacctacgagaacgccaaggaagctgtcgttggcaagaaagaagctactaataacgcgtacagtaatacagaggttattcacgatgttaacattcagcccgatgacgtgtcggcaacgggggaagtaagggacatatcagccacaaagactcatgatatctacgattctgccacggacaacaacaacaacaaaaccggttccaaggtcggagagtacgcagattacgcttctcagaaggccaaggaaacaaaagatgcaacgatggaaaaagctggagagtacacagattatgcttcgcagaaagcgaaggaagcgaagaagacgaccatggagaagggtggagaatacaaggattactctgcggagaaagctaaggagagaaaagatgctactgtgaataagatgggagagtataaggactatgctgcggagaaagccaaagaggggaaagatgctactgtgaataaaatgggagagtataaggactatgctgcggagaaaacgaaagaggggaaagatgccactgtgaataagatgggagagtataaggattacactgcggagaaggcgaaagaggggaaagatacgacgttggggaagcttggggagctgaaggacacggcttcggatgcggcgaagagggccgtgggttacttgagcggcaagaaagaggaaactaaagagatggcttcggagaccgccgaggcgacggcgaataaggcaggggagatgaaggaggcaacaaagaaaaagacggcggagaccgcggaggcggcgaagaataaggcgggggagatcaaggacagagccgcggagacggcggaggccgcgaaaaacaagaccgcggagaccgcggaagtgacgaagaataaggctttggagatgaaggatgcagcgaaggacaggaccgctgagacaacggatgcggcgaagcagaaaactgcacaggcaaaggagaacaccaaggtctcaactttgcatcttttaaaggataatttgtttatttttccttcgagattagttgaaattacttttattctctttaaaatggtgcatgtatctgtggaatgtagtggatttcgtcctcgtctgcttaaaggactaaaaagttatcatttttaatatgcatatatctgaaatgtgctgatgtaagtacattttgtccatgaatctcaccacatatatctgaaaatgtgttagataagtagatgcaatggtgtgaagtgtggcagaagagtagattttaatcatgaatcttcgaatgccactaatgaagaaggttgaggatgaaaaacactttctctctccatattttgatatatgagatgaggggactaaaatcacttataagattgaaaacctaaaaactagttgtacttatttattaacaatctaggtcgttacttatctgcactgccatgaatgtgtatgttttgttttcctaattttatgtatttgaactttctgaatccgtcactctgattatacatgggtacattaatgtgcatatactagttgttgatgtttgagaaaattgaatagtttttgtggatgtgatgtgatgcaggaaaatgtgagtggtgcaggtgaaactgcaaggaggaaaatggaagagccaaagcttcaaggtaaagaagggtatgggggccgtggagacaaggtggtggtgaaagtggaagagagtcgaccaggggcaattgcggaaacgctgaaagccgccgaccagattgcgggacagaccttcaacgatgtaggacgcttcgatgaagagggtgtcgtcaatgtggagcgccgcaagaaataattaaaacgtgatctatgatacaacaatattagtatatatagacgcatgcagtttatatagtatatattgtcatgttgtatgtttttacattttggtttgcttgtttacattctcttcaaaaaaaaaaaaatgtgtagtacgtgtaaggttttgaagattggttctaggctccgtgggaaccatttcaacaataaacattttgcgcgttcttgtacacgtagtgatgagaagagatgccttatgggcagtatcatctaaaacttattttcatccatcatagaatttggatctattggactggactgaactgaactgaatgatccttttttcttttttaatttcattcactaacaaatacataaaacaccagatattaacttagccagtatgaattttaactattttgtctaatgctatgacttatcactgtctgtatcatctttaattcttttttcatattatttatattaaataaaagttaataattaaaattaccttccaacttgtatcgcgcatctttcattttatttgtgtggataaaaataatcctttcacttggaatctccattttgaaatgatcattctaaaaattatttgtgtggataaaaataatccttttatttggaatctccattttgaaatgatcattctaaaaggtaaattttaccttttggaatagatttttggaacaattattcttattctagaatagcttagagaactagaatagcttagagaatagtcattctagaacaaaggaataggctttctgattccaaaataggtgttccaaaaaatgcaatcaacatttcgaattgtatgtaaaaaaaaaaacatatttttgtaacaagtattccggaagctttgttttactattatgaaacacctattctaaatgaaagttgtgttcctgaatgatcattccctaaccaaaaataaaagcttttggaataccagttatgaatacagttgtcactattcatcttctggaaaggattgtccataaaataaaagcttagtataaaaaaggcgaaaatgcacttgcacgtcaacccaacctcaccggagctatgtagttggaagaaatcaatggtggagtcggcacaaatggagacgaagaggaagacctaatgacagagcaaacacaaatgaagtacaagaacgggtgggactccctcgtggagtagcatgctgaggaagagaaaagatataatatgaagtgggtagtttgagaatgtttaaaaattgagaggtgtaggattcaaatgttttgcccagtgttttattcagg

SEQ ID NO: 241 - DNA, 5894 bp, Glycine max
  source 1..5894: mol_type = genomic DNA
ttagtatttttagttatgtaaatattgcttttttgggtagataatgactcaattagttattatattttatagtgttgattttttttattagttaccaaataaaatctccaacattacgttggtcagaataaaattaaacttaaatctcttaaataagacattaaatttaaatattatggatggaaaaaaaatcattaaaggagagataacgatgtatgataagatttttttaatctatttttaaaattgaaatcatagaaaaataaatttaaaaatatgaaaacttgtcaaaacaatccaaattgaataataaaaaaatttaatttgatttaattaaaatttaatattacattcaagtcagacaacatcaaaccatatattatttatatgcttgatttgtatgatttttgtaaaaaaaaatcaaactaaaccacgcgtgaacacttctaaatctatcattagtatgctattattttgaaattaatattaaatcatattttatttcaaaaattgaaaaatcctattatatgtaaaatattattgttttatattgttatatttaaatgttatttttcatattatttgatttactaaaataatacaataaaaaattttagtttatatgatatgattaaatgactattatatataaaaatatttacctttaactaaaatttaataataataacaataatattagcaataagaagaagaagaacctagatgattgagtcttgtaagttgaggtcataaagatggacggcacaggtgttcccaacactagaaggaatgggattggttgaaaaaacaaaaagccaaatttctattggtccacgtcatcatcaatgacatgttcgagcgtcaagcttcaagttcacgaaatgaccaggtttcggtagagtccctcaccacactacataaaagcctcgctccctcgtgccatttcaaaacccagaaaccaattacaaattacactctttgccctcgcaccttcaacttaaccttttctactcataatcttaacaacttgctagaagaagataaagaaagagaaaaagtgtgtgtgtgagagagagagcaatggctggctcgtgggcacgccgttctctgattgttctggctatcatttccttcggtaactttcaccacataatagatctgatcatgttttcttttagctctttgctgtttttgtttaaatgcgcaagtggaaaaatgtaaccagatctctctttctttgaacttttttttggatctgttttgtttgattcgttgtgttacgtagcggtagatcagtgactgagatcttagacgtagttgcttaggaggatttcgtaaatcgtgccatgttctgctttttggtgacgttctttgcgaactcgttagttccaggatctttcacgtttgagtttgagtaatatgcgtttctctgcatctgagaatttcgtcaacagtgatcagttggagttgttattccgatttccgagggagcgttttgtttttgaaaatgctaattgttgcaaaatacttttggtaaccaacacatttatctctgatttctgttcaatcagattttatatttcgtaactaacacacgtacctttgatttcttttaaatcagattttatatattttaaagtttttttaatcaacatttgttttcaaaattatcattggtcgacgttaatgtttcgtgcaaatatgtttctaactaactagcaatgctcgtttgttttttgttttttaagttgtcgataaagattttcactattaagcggagtgattagtattagccatggaaagaagttttgttccgtttgttgcttaagattattgctttcattgcatggtttttcaaaggattgacgtttgcgtatttgcgatttgaatatgacatcgtgaagtttcctccggctgataattgaatacattagtaaaaagtataaagtagaaatgtctttatggtaatttgttaacggattcatatcattattgtattttatcgtttattatgctaaataaattttagtttatcgggcttgtcatttgtcaagcactattatgtgcaaatgcagaaattaattccattttgatgagtttcagtgttgtaaaactgcaattatgtaactaacattgagatatttttccataggatgtttatttgcaatttccattgctaaggaggaagccacaaaattggggacggtcatcgggattgatcttggaacgacctattcatgtgttggtgtttacaagaacggccatgttgaaatcatagccaatgatcaaggtaaccgtatcaccccatcgtgggttgctttcaccgacagtgagagactaattggagaggctgccaagaatctggcagctgtcaacccagaaaggaccatctttgatgtcaagagacttattggaagaaagtaagacttactcaagttgatttttgacaatttgatttgatgggatcaatggtgactgacatttatctttttgcaggttcgaagataaggaagttcaaagagatatgaagcttgttccttataagattgtcaacaaggatggaaaaccttacatacaagtgaaaattaaggatggtgagaccaaggtgttcagccctgaggaaatcagtgccatgattctgactaagatgaaggaaactgcggaagcattccttggaaagaaaattaatgatgccgtggtcactgtcccaggtaactggaagtctggaacaattcacgacttatttcaactgcaatttgattgttttcctcctgcttttgcctttatttcaatatctcacattttcctttaaaatgcacagcttacttcaatgatgctcagaggcaggccaccaaggatgctggtgtcattgctggtctcaatgttgctagaattatcaatgaacccactgctgctgccattgcctatggattggacaagaaaggtggcgagaagaacattctagtctttgatcttggtggtgggacctttgatgtcagtatcttgacaattgataatggtgtttttgaagttcttgccacaaatggagatactcatcttggaggtgagtacttttatacacatacacacaagctaatgtctgttattctatggaaatgaaattatataatctttccttaaatttttccttttgttgctaatgtctgctattctgtttcccctttccaggtgaggactttgatcagagaataatggagtacttcattaaattgatcaagaaaaagcatggaaaggatattagcaaggacaacagagcacttggcaagctgaggagagaggctgagcgtgcaaagagggctctcagcagccagcaccaggtccgcgtggaaattgaatcactttttgatggtgttgatttttctgagccactcacccgagctcgttttgaggagttgaacaatgatttgttccggaagaccatggggccagtgaagaaggctatggaagatgcaggattacagaagagtcagattgatgagattgttcttgttggtggaagcacaaggattccaaaggtacaacagcttttgaaggactactttgatggaaaggagccaaacaagggtgtcaaccctgatgaagcagttgcctatggtgctgcagtgcaaggaagcattttgagtggagagggtggtgaagaaaccaaaggtaccgtagtctgtaatgtagcttttaaattacttgtcccgaagtcataaatattatttacgcaattagattgctaagcataacactttctaatcgttgtgtggcaatatctatccagacatccttctcctggatgtggctcccctcactctcggaattgaaactgttggtggagtcatgacaaagttgattcccagaaacactgttatcccaaccaagaaatctcaggtgttcaccacctatcaggaccagcagactacagtctccattcaggtatggtgccattattcaatttgcattaaagggcatgatgcgtgtttttcttctaaatctaaaatgcatgactgtagtgaactatgacggggttgactcgaattcactgctttttcttaatacaggttttcgaaggcgagaggagtctcacaaaggattgccgccttcttgggaaatttgatctgtctggaattcctccagccccaaggtttgttacctgctttgatgatgcagtgtcctctctcaatattgctcaatttaatgtttgtaattcattggtattttatttggtaattgaacaggggtacgcctcaaattgaagtgaccttcgaagttgatgccaacggcattctaaatgtgaaggcagaagacaagggcactggtaaatcagaaaagatcaccattacaaacgaaaagggacgtcttagccaggaagaaattgagagaatggttcgcgaagcagaggagtttgcagaggaagacaagaaggtgaaggagaggatcgatgctcgcaacagtcttgaaacctatgtatacaacatgaagaaccagatcagtgacaaggacaagctcgctgacaagttggagtctgatgaaaaggagaaaattgagactgctgtgaaagaagcactggaatggctggatgacaaccagagtatggagaaagaagattatgaagagaagctgaaggaggttgaagccgtttgcaacccaatcattagtgctgtgtatcagagatctggaggagccccaggcggtggtggtgcatcaggcgaagaagacgaggacgattctcacgatgagctctagattagtcggagtctgttaaatttttatgatagctgggaattaagaagtcccctgcgcttgcttttttggtggcgatgataagatactttgtgaaattacttgtactttacttttttgcttagttttacgacgaaacttcttcagctgtatgaatgagccttgtttcacttctattctcttacgctcctgtttttcgcgtgcttcgtgcctgttttgccgaccataagtttttaaatcaagtctttgtaatttaaaacaggaaacctccgtaaaatattattgagccattttataaaaactcacgtacggatatcaaatttctatcggttgctatttgtttttgatattttacctggagtttgtgacatggctacaatagagtcagtcataactagaaccgtagacgtatagcgagtgaatgaagtttaaagatggattcgtcaaatgcagcgtccggaagttagaatttttgtttatgaaatgatgttttctattgttttaaccttttttatacatgtcatgcttcttttacatagtgaccgcaccacttgcctttctattctgtaacaatggttactgacaagggatactgttatcaaatttgatgggattagaaaatgaaatggagaagctgttatatataataccttgatcacatgcagaacatggtaatggatggctttggtcatattatgttagtccctgtttgttcaatgtcgagaatgcgattcgaatgactagacgttaaggatttatggtaacgaaattcgttattttttttttgtttgtttagaaaaatcgtggattttgttagaatctgacattttgacattcttggttcatctatacgtcaaaatctatttcttctatatctatttttatatgtttgaggttttataaccacaattgtacaaattctattgtctcattgcctcatctaattttaaacggacgatttagggacctaaaaataaatacttttgggaaaacaatttttttactagaaattgaaggaaaaagttcagaaattgacatatttatagagacttgtagattaattcaaccttaattttttaatttaatttggttgtggttaacaagtaccaaaggactgagcgactatgaagccttgaaatagcagg

SEQ ID NO: 242 - DNA, 3324 bp, Glycine max
  source 1..3324: mol_type = genomic DNA
ggtatcagtactccatagaccataaaaggtgatctcagttactttacccaacttaagggatgatcatgaacgtggttctctttacagaaatgtgtttcttatagacaataaaaaatgtttagcgaatttgggattattcaagaaattaagttgtttggttttccagaaggtatattctaaggatagcctttgcttattccaattctcttgctccacatgttcagctgcaaagggaaaggcataaacgagaatcctcctttggaaaagtattaaaatacgcagtttcaatttgcaaaacaactaaagaaaagaaagagattcaacttgcagaagaagaaacgaaattaatgatcaaaagaagaaacgaaattgattacttttattcaacggctaattaaagagaattgatgcttgaaacaaataatttgattgtcattctaaattttcgcaatgcaaccttgtactgtagccgttaaggtgttcggtaacttaaaattgatgcaaaaatagttatcggtgataataatttatttatgtcaattgatatctttaattatctttgatatatatttgcataattgaatttatgtcagagtcttcaaattttcgaattctgtataaatttacctaatttatatatgaaatttgactcgtttaaaaaaatatcattttagttaaaataaaatttatacagaaaaataaaaataaaaataaatattttatttttatgtaactttatatttattaaataaattaatggttatattttttgatttaataaactaggtaagaaaactttgaagttttaattataaattaattaatggactataataaaaaatttgaagtaggagtataagtgaaggcgtgtatcgcggtgcgcaaagcgtgaaacgtggtgtaagagtgaagggtatccaccgaaggaatattcggttccaatatgcattgattgggtgacttttctctctataaaaaacagagtaaccccaaatcgcaaaagctaagaaagaaaagagaagaaacgaagatagaatgtgcacagccctaaagacgaattaccagcttagcgaggagatcggtcgcggtcgtttcggcaccatcttccgctgcttccacccactctccaacgaaccctacgcctgcaaactcatcgacaaatccctcctccatgactccaccgaccgcgactgcctccagaacgaacccaaattcatgaccctcctttcacctcacccaaacatccttcaaatcttccatgttttcgaggacgaccaatatctctccatagtaatggatctctgccaaccccacacgcttttcgaccgcatggtcgatggtcccatccaggagtcccaagccgccgccctcatgaagaaccttctggaagctgtcgcgcactgccaccgcctcggcgtggcccaccgcgacattaaacccgacaatattctgttcgattcggcggacaatcttaaactggcggacttcggttccgcggagtggtttggggatgggaggagcatgagcggcgtggtggggacgccgtattacgtggcgccggaggttctgttggggagggagtacgatgagaaggttgatgtgtggagctgtggggtgattttgtatataatgttggcggggattccccctttttacggagattctgcggcggagatctttgaggctgtggttagggctaatcttaggttcccttctagaatcttccggacagtgtcccccgccgccaaggatctcttgcgaaaaatgatctgtagggattcttctagaaggttctccgcagaacaagccttgagtaagttactacttgcttctgttttcttgtttgatataatttttggggggttttgtgttgatggaatttttggatgttttgtttttgtaggacatccttggatcttgagtgcgggtgacacggctgaactcacttgagaatgtagctagagagagacatgacctaagttacatggtgcagtgtagctaattttgctccttttgtcttttctctctactgtctcaataaggtggtctactcgtggtggcagaggaaggaacggaacagagcacgcttctgtagatttttgttttgttttaggaatcttatatctgagactctgtatgagtcgagagaatcttgtttttccactctcggtgattttctctctgtgtagtagaaagtgagaaagtgggtgatctcccagactctcttcccccttgtagaaaggagtttgtttgctgatatccttctggttttttgtatctgtaaatcataaataaacaataattttgaatggtgtttaatttaatctttctggttttgtggttttgatttctgtttttttaaggtatttaataagggtgattcttattagtaggtgaaattagatgaatttttaatgaacatttaagtgcatattttaaattttatttaattcacgggaagaactgttattgaaaataaattacaagtaaagaatataggttcattttgtttgaagttttgtgttgtaagaataatttaaattttcaatctttaaaatgttctttagatgaagatattattttattatttaaatttaggatactgattgatataaagtatatcgaaagggtccttttaaatagagaaaaataagaaaactcttaagataccgaatagttattgaaatgtgtgtggacataaacaagagaaggtaaaattgtgtcatatcctttcattgtgaaggggtttgtcacacttgaaatttctacttgacaattgcaccaatcaacttgactgagtgtttagcacgacgaaagaactatcaaatgggaaaattgcagtcaataataaactctagtatttattaaatcaactgttaggtctgactataaagtaggatgttattatgtttctttttctaaagcagtgggctagtggtgtctctggaagactactggaacttttgtaaatcttcttactggcttgaagaaacaaatagagtgaaaaaaggaacagataacacaaactgcagggacctcaactgttaaatttgatttctaacttaataaaatatgtgtaaaaatattttgaaataattttgggtgagtactattatttcagtaacacttttccacggtgtttttctactaaaaataagatggaaaaataataaaaatatattataactgatactataagtcattatattataaaattgttaagtaaaaataatattatcctattttttttaactgttaaagacttaaaagatcatattcctcctcaattattgtgccattcattaaaataagggagtataagtt

SEQ ID NO: 243 - DNA, 3969 bp, Glycine max
  source 1..3969: mol_type = genomic DNA
tacaattttttttattgaaaacctaaaatatatttgactctaatttttttgctgatgcaagtctaaatttaattaaatttagacctaaaatatattgaaaacctaaatcattttttacaagataaaattaaattcttaactacctgttaagagataaaattaggtgtcaatcatattatgacatgctagttgtcaacacatttctttgactgaggcgcccgcctattgagctcaattgcaaataaaagaaacgtaatagatgatacatagatttttcgtgattcattatattttcgaatatagttggccgaataatctcatagtaaatttaaagaataaaaatatttgatgaaatttctaaaaccataattttaagtaggattaaattctgatgaaaaaccaatctcataatgaatctaaagaattaaaacttacaaaaatatttgatgaaaattctaattatgatgatactaaatcataataataaaaaaaaatatgatggcagcgatcaagacacgacaacatttcatttatttgaccgaggctgggtcacgaacgagtagcattccaaattgaaaatcgaaaaaaagaaaaggcgcagccgatcttagaccagagtatagtacatgtaccaaagaagtgtacctagtaggtgaagaagacaagttgaaaacaatcgccatcttaaaatcttttatttatttttttgactgaaaaaacaaacaactacagtactttttgagttttggaccattttgttaagtaaaatatggaaacatctgcatttaattcttgattcatttgtcactcttaatatattttcttgttccttaatgtcctctttaataggaagaataacaattttaacatgataaaaagggtggtaggcccacaagaattgaattgaatacaacaacaaaattccccataagtagagtatggtggagtagatgcttataaattggaatcttagaaggttgtttcctcaggccaagagcttggaaaattagcctcacaaaagcaaagatcaaacaaaccaaggacgagaacacgatgttgcttgaacttgcacttggtttattggttttggctctgtttctgcacttgcgtcccacacccactgcaaaatcaaaagcacttcgccatctcccaaacccaccaagcccaaagcctcgtcttcccttcataggacaccttcatctcttaaaagacaaacttctccactacgcactcatcgacctctccaaaaaacatggtcccttattctctctctactttggctccatgccaaccgttgttgcctccacaccagaattgttcaagctcttcctccaaacgcacgaggcaacttccttcaacacaaggttccaaacctcagccataagacgcctcacctatgatagctcagtggccatggttcccttcggaccttactggaagttcgtgaggaagctcatcatgaacgaccttctcaacgccaccactgtaaacaagttgaggcctttgaggacccaacagatccgcaagttccttagggttatggcccaaggcgcagaggcacagaagccccttgacttgaccgaggagcttctgaaatggaccaacagcaccatctccatgatgatgctcggcgaggctgaggagatcagagacatcgctcgcgaggttcttaagatctttggcgaatacagcctcactgacttcatctggccattgaagcatctcaaggttggaaagtatgagaagaggatcgacgacatcttgaacaagttcgaccctgtcgttgaaagggtcatcaagaagcgccgtgagatcgtgaggaggagaaagaacggagaggttgttgagggtgaggtcagcggggttttccttgacactttgcttgaattcgctgaggatgagaccatggagatcaaaatcaccaaggaccacatcaagggtcttgttgtcgtgagtttcctgcttcattcattgatcgaaatatgcagtattttgttaacaagagatcgagaattgacatttatatattcatgtggtggcaattaattaacggtacgcattcttaatcgatattgtgtatgtgcaggactttttctcggcaggaacagactccacagcggtggcaacagagtgggcattggcagaactcatcaacaatcctaaggtgttggaaaaggctcgtgaggaggtctacagtgttgtgggaaaggacagacttgtggacgaagttgacactcaaaaccttccttacattagagcaatcgtgaaggagacattccgcatgcacccgccactcccagtggtcaaaagaaagtgcacagaagagtgtgagattaatggatatgtgatcccagagggagcattgattctcttcaatgtatggcaagtaggaagagaccccaaatactgggacagaccatcggagttccgtcctgagaggttcctagagacaggggctgaaggggaagcagggcctcttgatcttaggggacaacattttcaacttctcccatttgggtctgggaggagaatgtgccctggagtcaatctggctacttcgggaatggcaacacttcttgcatctcttattcagtgcttcgacttgcaagtgctgggtccacaaggacagatattgaagggtggtgacgccaaagttagcatggaagagagagccggcctcactgttccaagggcacatagtcttgtctgtgttccacttgcaaggatcggcgttgcatctaaactcctttcttaattaagatcatcgtcatcatcatcatatgtaatatttactttttgtgtgttgataatcatcatttcaataaggtctcattcatctactttttatgaagtatataagcccttccatgcacattgtatcatctcccatttgtcttcgtttgctacctaaggcaatctttttttttttttgaatcacatcatctactataaactatcaatccttatattaattttgagttgccacatcatttatcccaatttcaatatttcattttcaatttataagatgagtaattcattccatctgtcctgtatcgtggttggattctagataagattcaaataattttaattttgtaaaactttctatcctccaaaataagttattgaaaattgctattccagtacaaagattggtgcccaaatgaagcctatacaaaaatacaagcaagctgcactaatttaaaaacaacaaaaacaactttgtaatttaccaagctactaaatcagtcccaaaaccatattgtttggcagatcacaggctccatcacagctctatgatatgtaaatatcaccatggtcccattgctttgtttgtcttaatttatttttgtaaataaataatatgaaaagaaatcgtacgcgtggcttgagggaagaacataactattgaatttcctttgatttcttcattggatttccttttatttcttttgtttctcagaaacttatcgaatctcttcacaaaatctgaaatcatcatcttattctcctctacttttttttatagttgcatttcccactaccattttaggaatgaagggaccaatttcaatgacttcccatatatttaaatctattgcttctataaaaatctgcattcgagtttttcaatagtgataaccctcgccattgaaaacaaaaggcctattaatagaatttctctcgaaatggaaagttagatgaaaccatatttattcttgaagtttttaaactttagataagaaacctgctctgataccacttgttggacaagtggcctcaataacttaagacacgagggtgaattaagtcttacaattcccactaacaaacttttaaccccctcctaaatgatagattcaaaatgcagaagaaagcaatcaatttaataatgttctttaaacatgcaagacaaaattgattgcaataacataaatgacataagggaagagagaattgcaaact

SEQ ID NO: 244 - DNA, 4066 bp, Glycine max
  source 1..4066: mol_type = genomic DNA
aatattacataagatacttttttggggggggaattgtatttactatgaaagtcatttgatttaaggcttcattaaattaacgctgcagtactgtttggtttggaattatgccattcaagacccaaataagagtatgcacgtatttagatgtgaggaactttcaaaaggttggagttgagtctgctaatttgtaattttctcgtttggaagctgttggcatgttgctacgttatttggcatgtaagtggaataacaacgacgtagaaatacttttattttgtgcccaaatcatttagcaaataatacaaacttgtttctttgctacaacgcacttagtaaagtcatagacaaaaaaaattaaccataatgtgcgagatcaaatctcataactcttcttcccccttctccaggggattgggaccttcatctcttgtgaacttcccttaaaataaaacccttacatgcattaaaaacaagttaatggtaaggtaattttgtaccgtacattttttttcttacatgctgaaatggaagaaattaaagaacataaagtataaagtatggtcatgaaaattgtaagaggaatttccgggtaaaagtccaaaaccgaaagaaaaaataggtcaagccataacatgtatatgctgtcccaccacagtttagtctctgcagactttttgtcaagccgcgtgggtcccacttctggcggacccaccacactaatgtcgtaataatgtggagagtcgcaattacaagtccattttctttcaagatttcttagagacttttgtgccccctaggcctccacgaccaagtcataacccaaactcaaatatttaataaaaataaatccatcaattagcatagttatgaaaccaaccattccttataaataccctcacaacacatattcattttatatcaactaactttgtgcttcctccgcagaaaaataaaaaaagagtagctagcactagctagctaaacacagtacgagtagtgatcataggcaagcaaaagcatattcataatatggcaaccatggaagacatgaacaacatgagtggtgaaattacacttccaggcttccgattccacccaactgaagaagagcttcttgatttctaccttaaaaacatggttgttggcaagaaacttcgttacgatgtcattggtttcctcaacatctatcagcatgatccatgggacttgcctggtaatcagttaaaataaactatgtctctgttttatgatctgtgccacttaattgttatgacatgttatataatatatatgttcatagacattaatttgacaatgttatattataggtttggcaaaggttggggaaagagagtggtacttcttcgtgccaagggacaaaaagcacggaagcggaggaaggccaaaccgcacaactgaaaaagggttctggaaagccaccggttcagaccggaaaatagtgaccttatctgatccaaagcgcataattgggttaaggaagacactggttttctatcagggaagagctcctaggggatgcaagaccgattgggtcatgaatgagtaccgtttacctgacaattgcaaactacctaaggtatattattatttcaacattaactattaccatttttctttctttccttttaggcagcttgtgatttgaaaaaataacttagtttcctgccacgtgtttttcatatcacagattcatttccccccacctttcctttacgcgtcaatcaatttctcattcatattagattaattagaataaatttgttgacttttacttcaaagtcatgcaagtgatttaaacataatataacaatttaactctttaaattagtatttatatttatttataagtttaattgacataaaatgtccgagtagaatttctcctcctaaactaaaccgaaaaaatggtcagtacaaaaacttcaaaattataaataatgtgtttgacagaaagaagataaacaatattaaagaaaaaatttatattttttttttagactcacatcttttatcttttatttatatattttttattttcgtcttttgaatcaaacacacccttaattagaaattaaagatatacataacttttaacatcattattacttattatatactagtttgttattggaggacatcttaagtgtatattctatttttttttctttatttatttcgttacttttaacttcttgcaaaaaataccaggacttttcctaggtacaagtgtctcgttaagcatatggtatatctgacagggaaggaagtttcctagagacagaaaagaaaatgatagtacatagtagttactttctatacggctaggatgtgaatacatttagtgtgcgcccttttagtcttattttatgaacctccattcacaagaaagttagtaagaattatgcaacttaaagttgaagtagtagtacacattaaattacattgcaaattaatggtactaaaagtggctaataaattaagcatttgatgattatgatatttgggtacaggaaatcgtgttatgcaagatatatcgaaaggcaacttcgttgaaagtgctggagcaaagggcagcactagaggaagagagagagatgaagcaaatggttggttcccctgcttctccttcctccacggacaccatgtcctttagcagcccacaggaagagcaaaacatgcccttgccattgttgcaacatgttcttaagaaagagtctgaaactgaagacatggtagtgcctaaacaagaaaaaataaccaaccaattggtcttaaaagacaccaacaaaagcacttgtggcacatcactacaaatgccctttgggaaggagaagcttccagaccttcagcttcccatgctctcggattggacccaagataccttttgggctcagttgaatagtccatggctccaaaactttactcccaccaatattctaaacttctactgactccactctatatgcatcattactcaaataccatatcaactgcaacttaatcagttattacttatttattttggaatgtatatgcagtgaattagtaattaataacgttttttatattagctcaattaactagacatgttttcgtgcacatatatggtgtttcctatcaagttcagcctaactggaactttttgtcaacccttgaagatgtttcactcttaaaatgaatgttcaagaagtaaaattcatcagcagattcaattcggcagtttcactattcactttttggagacttgctttaataaccattgatctgctcgttttccagctcaagaacattttatattacgatttaaggatcacaattccttttatatttctttgcaataaagaaaacattgtttcctaaggtcattttggaacactacaattctagaatggaaatcattaatctgaaatgaaattagttaggcagaatttgcataacatgcagaactaaacttcaaaatccaaatagaggacgtgacccaaatcctattaatatatcaaagtagttttcaagaagaatggtataaaaaggagaattttagaattagacgaggacctgcctaatgcattaacttagacatccagttaggttaggttatgtccttgttttcaaaaaacttctatcagatcaattttggtaaaatgtaattagtgtgaatgaggagaagtaatttcaattattaaaatcaacgattaaaaatatttttaatcaggtatccttaacttaaaattatggaatagtctcttgaaatagtaaagacaaaaataataattgtaggagtacaataaatctcacaataaagagagagaaaagtgaaagaatagatagaattttaaaatgtaataaataatatggtagagaaaaaataaacacaaaataatattatataaattgttttaagaattattgtacatgtattatatctcattttaagaattgttttaagaattatatatatatatatatatatatgagatcaaaccttaatcacatacataagagattgattatttatccatcaaaccacaccatggtgattata

SEQ ID NO: 245 - DNA, 4050 bp, Glycine max
  source 1..4050: mol_type = genomic DNA
cttctggtcctacgttttctacacatgttgcgcaccgtcttcgtcgtcgtaagctcgttttctttcagctcttctaccacgccatttccgcgttcatgtctttcctgtggctggagttctcgcgatcctcttcaccacgctcccgttctccgttatgtttggttacaggttctggaccgcagtacgtggcggcgcaaggcgagtgcctgccactcgtgctcaactgccagattgcgctgctcgggtgcaacttggtttgccacgtggcggtgtcttgttgcatttttttacaggtgggtgtaacgggattggcgcgtgggtcgtcaattccgtgctcaactgtgctattttgttgccttttctaaatttttatcacgttgtgagaatggtagcattgctcgatcgttcctgctcctctgtcttacgcgctggaaaagaagcacatagtaataaattgaagtccaattaaaagcacagattcattgaaggttaagtcatgagtaccgttgccaatgatggcttgaaaggttttaggttctaaaccatcatgtatgagtaaaaatgtcttttgaaaagatctgacatggatacaaacacgaatttgagatatataatgttggatgaaaaaagctctaaacaaaacatacataaaatgcagttacacacgagatattgcatgatgggagcattttatattattcattttgagtgaattttttaaaattactaattataaatatttaaatatttataaaattaaaacaaaaaattagttaattatattttatatttataaaatcaaagataaatattaaagataaaccaaagaattaaatcacctctaaatttagttaagtatttaaatgaaatattagtaaaaaaaaaaactattaatacacagtaagtgcagtttttgaatgaaaaaaacaaagtaaaatatttatcttaaagaaaggcgtgaccggtccacggccacgtgggcgatcacagtgggcataaaagggtacgtggaataggaacaaaaatgggttggaaatggaaatggagagtgagagagataggtgtgatggattgtgtcggccatctttggatttatcttaaagaaagctcaacgtggcggccgtaccagacgacagactagaagccaagtggtaaactcattcccttcacttcaccctctcttttctcttctccaattatttatatttcctcacaaactaacaattttcgttttccaccctccatataaatataaaccaatacaacagcaacatgatggtttctgtgtcttgagggtgtaccaatatgaacagaatctcctctcgacacctttgctttgctgcagctcgcaactgcaacttcccacaaatataaatatatattacttcatggtcacacatagttaattttattaattactactaggtagctggtttttaataggtagtaggtaggtgtaatcgttgtcttcctgcagatatggaagaagcgggtttaggagattgttgttcctctaatacgactattacgaggaaaagcgagaagcgaaagcagcagcaccaacaacaagagaagccatacagaggaataaggatgaggaagtggggcaagtgggtggcggagattagagaacccaacaagaggtcgaggatctggttgggttcttacgccacccccgtcgccgccgcacgcgcctacgacaccgccgtcttccacctccgaggcccttccgctcgccttaacttccccgaattgctgtcccaggacgacgacgtttcgacccaacaacagggcaagatgtccgccgattcaattcgcaaaaaagcgacccaagtcggcgccagagtcgacgcgctccaaaccgcgcttcagcaatcctcgtcgacacactccattagttccagccacgtcagctatgagaaaccagacttgaacgagtatcccaaacctgaagattagtaatttccttcaaccttcaagattaatattgatccaccaatcatgggttctgatgtgacttatatatagggcttcaacttgccctcttcacctatgttaatttgaaaagaaaaaacttttatatttgtcatatgatttatctgagtaaatatttttttccagtttatttaattaatattagaaagtgtaggaagaaatagacacacctgatgagaattgagatgaggctaattaacttgttaatgaggtgagtaactcctttaactatatataaattaaggggtatatatattattagttgctcacctcatgttgttgctcatctcacgaagaaactcattttagattacttttttcctttcattatgtgtatgctggagcggtggactggtagctacatagattctcgctatgatggggcatatgatcatgaggtcttttctcaggtcggttgtgtgttgtaatttgtaacgagatatccgtaacacaataggatcaaattaaccgtgttttgttgtttcagattattttttctatgttcccgatgaattcaataatttgatatccatgtggtgaaaatgatttcatatatactttttttacttactgttggaaagttgtgtagtttctctgatcggcgccgcttaggcttgtgtgtgtgaactatattaattctaccatgtttatgttatcttgatgattgtcaaaatatgagcaaatgatgcagtgtgaaaaaaggccaagggtgaagagataaagataggaacagcagtggcccaacaaagccgcattaatatgaaacaaacaaacacataatgtttcacttgtcgaacagtgctaacaagtggatagagagataaggaagaattgagcaccaaaagcatcagttgcccatgacaccccacaaaacttctttttttctttttcttaaaagaatatgcgagataggcggagaacagggtggctctatctcaaagtgaggttgtcacttgtcacagtcatgggaaagttggagtttaggatcagttgcgtactttcgtttgatacacattgtaagagtagggcctcagccagctcttcatttttttttcctttagttttccacttagtattcttgtacaacacatttccttaaaaaaatgctgcatgccgtgaaaacatttcaacaaatagcgtttaaatgatgtgatcctatgcttttcgtctctctttttttcaatttataacttattttaatgtaaccactaatatatatacacatatgttctttcgttttgacacacaagaaatctcttatttcgtcttaaatttagaaattctttacttatttttatattttttaaaaatagaaaaaaaaaataaaccatacattatcaagtgaaaatgttcgtcaaacatttttagtttttcaggtgagaacattttccccttttagatgaaaccaaacagaacttaattgaattcgtgttgctatttttattttttattttttattttcgtcgagtgtgttaatgtttctcagttaacattgtgaatgatatatgcttgctagctctccaatgcaccataatcttaagtgttatatgtcaaatataatgttggagaaataatctcttcagcttggggtgggagatgtctcagtcaatgcgactatgtgcggcactgtccctttccaatcattgattccccttggtcaaacttcaaactccactgtgaatagcaaatacttgtactctcaaaagaaaaacaaacatgaatatgttctatttatataaatttattatatgttgcatgaataattttttaaaaatattctataaacgaaatgaatccgcttaaaagtaagtaatgaatcctaaatttatttagtacgttcttataaaatatgaattcaacaaagttaatcattgaattatgtaatattatttttctgaatctgtgtacatcaacatataaataaaatttatattttataaagtatactctatgttaaaattaataaagttaattagtgaaatattaaatagattttaaattatctgatcatttataccaatccaatgatatgattgatgaaattcaatgtccata

SEQ ID NO: 246 - DNA, 4204 bp, Glycine max
  source 1..4204: mol_type = genomic DNA
ttatcaatttcaattatataacaagttaaatattcatcttatgcaatataaaactaaaatattaatataataatttttttgctgtggtgttaattttcttttaaatatgctaaactataaaagatataaatagattatacactaacttcataaaaaaatattatattatcacccattataaatgattatacataataaattttttaagatttataatatccctatatataaacgcgtaaaaattataaattaatactccttacaaaggaccaactagatattgtaagaaagggagttcatttatacaataaggagggagtatataatatagaaggtgagacttacactctccttactttcacaaatagatatttttaatatatttttcttcttctcatcagatggacattttacatataactcttggaactagcaaaataataataatgtctatcactattattttaaaatataatcctattatctttaatctatcattttttatatctctaaatgtaatattttaataatttagtaaagaaatttattattaattaaaaaatcttacattataataaaaatgattaactgtaaatctaaagtgtaaattgtatattaaaaatatttatttattataatttttaattataataattccatattaaaaaatatttatcatgaaatttaatttcatataattcaatattcttatttgatgtaaataaatattatgtgagtgatgttaatgatttttttgaaaacttatgctactctattaattataaaataaataaatatttatgtcctaattttataaaaatatttacattattactccattagttgtcttatataataattttatcaaggtttaaaataattatttaaaaattatatctattacaatttgtaattgcaacaaacacttataaaagggccaacactacccaaccacactgcgtattgtataaatcaaattcttaaataaaagtgcccccattttcccaaaatcaccatctagagttttctcttttccactgaaaatcaaattagggtttggatttcggaattgccacagaatcatggccactctgaaagagcttcttcctcctgcaaaatcctcctccaccgcctactacgaccacaccaacgatccatggttcaagcagcgtttctcctcagaagaggaggagaaatccgccgccgccgccgccgccaagcagaagcccgttcccccctacctgaagcgcgccggcttcgttcctcggaaaatcgaggacttcggagacggcggcgccttccctgagatccacgttgcacagtatcctctcgacatgggaagagaaaagtccggcgccaaacctggatccaaaatcctccctgtcaccgtcgacgctaacggcaacgttgcctacgatgccatcgtgaggcaaaacgagaacgcaagaaaaattgtctacacgcagcagaaggatcttatccctaagtttctcaagaacgacgaagatgacgacgacgtcgtttccgacgacgaagcacagaaacagatcgaggaaacgatgcaggagaccaaggccgctttggagaaaatcgtgaacgttaggttaagcgctgcgcaaccgaagaatgttccgaagcagaactccgatgcgaagtatataaagtacaaaccctcgcagcaatccgatgcgttcaattcgggtgctaaggagagggttattaggatggttgagatgccggtggatccgcttgagcctccgaagttcaagcacaagcgtgttccaaaggcttcggggtctccgccggtgccggtgatgcactccccgccgaggccggtgacggtgaaggaccagcaggattggaagattcctccttgcatctcgaattggaagaatcctaagggttatactattcctcttgataagaggcttgctgctgatgggagaggccttcaggaggttcagattaatgacaatttcgcgaaattatcggaggcactgtatgtggcggagcagaaggcgagggaggctgttgcaatgaggtccaaggtgcagaaggagatgatgttgaaggagaaggagaggaaggagcaggaattgagggcattggcgcagaaggcacggtctgaaagaattggaggggagagaattggggttgtaccagccgcgccaccagctgtggcggtggatgaggacgatatgagagttgattatgagcatgagaaggagaatccgagggagagggatagggagaggagttttgtgaaggagagtagggaggagaaggaggagaggatgcagcgcgagaaaattcgtgaggagaggaggaaggagagggagagggagaggaggttggaggccaaggatgctgctatggggaagaggagtaagattacgcgggatagggatcgtgatattagtgaaaaggttgctcttggtatggcctctactaaaccagggactgaggttatgtatgatgagagactgtttaaccaggataagggaattgcgtctgggtttgccaccgatgatcagtacaatgtgtatgagcatgggctgtttactgcccagccaacgctgtccactttgtataggccaaagaagaatcttgatgatgagacttatggaggtgctgatgagcagttggagaagattatgaagactgataggtttaagcccgataaagggtttgctggggcttctgagagggctggtccgagggataggccggtcgagtttgagaatgaagaggctgatccgtttggtttggatcagttcttgactgaggtgaagaagggtaagaaggccatggagaaagtgggtggtggagggactatgagggcaagtgctggatcatctatgcgggatggtaacgagggaggttcaggtaggactcgcattggatttgaaagagggcattaggtagcacaatatttaatgttgcctgacctatttctagtgcgtagtgttgactgttgaatatccaccgtaatggcttaggttgctatgtctgaaaatgggtggttagaacaatgtgcttgtgttagcattttggtttttctccaaccccctgccctgccgccctgcttaggtggtgaaataaactgtttttgtacactatttcaattctgttaaaactgcttatggatgttacaacaatctctttccagtaaattatatattgaatgaaatgtattgtttaaagtagatccttgtctattgggggcgtatttgctctggttttggaagctttggacttgtggaagctttttctttccatctcacatgttgatatacaaagatttgaaactttcaatgtgtggtttccatgctttgattaattgattagagacagtatttactatttagcaactcatgataaccatgctttgaaaatatgtacatcttgttgtgatccagcatctgttaaggctgtcatagcacattaatgcattttgggatttgcatgcggcactcattacattgatagttagaacacaatatttctttcatggtttagtgatattcggtacttggtttagagctgaaattgctgttgtagacaactgcatttgttttctctggcagtcattatttccacttgttatttctgtttatattatagataaccaaaatatggttaaacaatacaccagcggtttgatctgctgtagcagtttgatgagacccttgagtccaataatttcttggacaaagaactattaccggttcagcaggtgaactatgaaactaagggggttaaaagtgtattctaggaggggaaaaggtgcgacacgtggcaaagaatccaggggtagagattagagaggattgtgttattaaaagtacgttcaattagtggttaggaaatttggcattaggcttgggcaaggaagcaagagaggattctgttatgatgagtgggcaaggtttggggaacccatgatggtgggggagagacgtttctgttttagagagattgaggagtcaaggggaggttgttaattagtcattaagaaattcggctttaggcttcggcaaggaaacagtgggttccttgagtatttcctattaatttcttttatggtattgatacttggatatctcatttcaccctatggtgagattaatacactgtttttcattttcattctgaagactggaggttattcatattactgtttggtggttgtttcattcttttc

SEQ ID NO: 247 - DNA, 2597 bp, Glycine max
  source 1..2597: mol_type = genomic DNA
gcccccttaattttttctaaattttaaattcaatgcttacaacaatttttttaatataatttttacttttcttcacctatatcttttataattttattcaccttctagttttttttatttttttcagctttataatgatatgttttcgtaaataagctcatgattacaaaaactcaaccagatccattgaaaaaccactaattttgtaattacatcatatagacgatagaactataactaaaaataataattttatattttgaacattaacttatgaatattttgtacataaattgataatatatttatcagatgaatattatacttttatgttggtccctctatcttttgaatcaggatttgttcctatcttaacctatttaacacctaaaagaagtaaaaagaatatataatgtgcataaagagagataaaagaaatctttaaaatgaaaaatatttatatattattactcttaataaaaattaaagttaaagaaatactcctcccaatgttgaaagtagagagcggtttccttatccaaaccaaagattaatgtagggagtagtagtaaatagaatccctaggcagttccgaaattgaattaagttcacgtggattagaatacacgcgtggtccaagattgtcttcttatacctaaaattcacacaacgcgtaacgacgaacattcagtgccacgtagacaaacaagtcacaatgggtctcttgtgttccccagggacgcgcctcgccaagtgagtgctgaccggagagtcaaaattcttcactcgcttcatcaaacactctctcacaacacagtacagtacggtcaacctcttacccgcaacatatatatatatatattggccgcaaactctcccacaacacagcaccaacaactcctattaagttttcagttctcacaaattaaaaaataaaaatattatatatacatatatatatatatatatattctcttcgagtccgtcgaaaaagaaaacaatggcgaaacccagcagcgaaaagccagaggagcatagcgattccaagtactacaaaggggtccgaaagagaaaatggggcaaatgggtatccgaaataagactacccaacagccgtcagaggatttggttgggatcctacgacacccccgagaaggccgcgcgtgccttcgacgcggcaatgttctgcttacgtggccgcaacgccaagtttaatttccccgacaacccacccgacatcgccggcggaacgtccatgacgccgtcgcagattcagatcgccgccgcacaattcgccaacgcggggccccacgagggacattcgggtcgacccgaacatcctcccatggaatctccatcgccttctgtttcggaagggaccatccaaacggacagtgacgtccccactcttaacggttcagtaacggatttgttcacgcccgttgggtcgagtggttacgcatccgattacgggattttcccgggctttgatgatttcagtggcgatttttatgtgccggaaatgccgaacgttaattatggagaagaaaacggggaagggttcatagttgatgaatctttcttgtggaatttttgaggggcaatcaaatccagtattcaccaccggccaaatgggttatggttcaggactacgagagaggcgtaaccaagtttaagaataaagtttttttatttatacatcaaatagtttattaaaattattattattttatttaaaatttatttttaaatataattttataatatttttttttaggtatattaatactaaaaaataaaatttaaaactatttttttagctaaagtccttacatggattgtttgatccttaagtcgatcctgtcattgttatggttgcagatagttttattgattctggaaccgtggtaatgatccgggtttgaattcgttaatttttggacgaccaaacctatatgattaatgagtttctatgatattgatatcgatgctactgtcaagattattgtaaaaaaaaaagttgtgattcattcaataatgaaaatattagttatcttgcaaataccagctttcttattttttttaactttgagttaagttatgttctacgacaagcaaaatttgccgtcaccttatagctagggtaacaaatttgaatgttagttttcaaattttttattacattccaactttatccttgtaactatttatattgaaatgaattgatctatttgtgtaagaaaaatgaaaatattagtttctccatcgtcaaatactaatttttattctatgatcacttttttaaatgaaagttgcattatttttatggcaaacatatcggttaaaaagtgttattaatctaatgtcacgttagagtatttttactttaaataggtatattgtcaaattcaaggtttaaattcaacttatttacctaacacaatatgtcttgggcttttttaaaagcttaatgtagcttaaaacactttaattattattaactaaattagtttttaaattaattaataacttttatttttaataaattacaatgctatataatacattagaaaagatgttattagtacttttttaga

SEQ ID NO: 248 - DNA, 3555 bp, Glycine max
  source 1..3555: mol_type = genomic DNA
aataatttctaacaaattttagtctgtcacaagtattagaaccagagtattagagaagataaattatactatgatccgttaattcgccaggtcacatcttttaagttgtccacgtcgttagtgagagtgtaactatcactcctctaccaatattaagccatggacacatcaattgcataattttttatattgtgttgaggcacacactatttgtcacatagtgttcgttttcatcagtatactaaacttttgtcttcactcattatagtttttaccaattcttgatgaatggagaaatagggtacatgctagtttctttaacataacataataattagttgagactagtagattttttttttttttttgaagcagactatagattgttctttagcctgaatacgagaaatgaattaaaattgaacaaacacggactcagtgaacatggtatcatatatatggcaatatatccggaggaagatgaagcattaattatatgtttatgcgcatcttggccttaaaccccatggggcaggggttgatactacctccctccgtttctttttcataagaaacatgttataggttattttataaataggaactggggtattaatttgcaggggaatatcattactgttttttttatttttattattattattaatattgcatttgaataccttcattgttgactggttctctcttcagtctttaccttttttccccctaagaatagccaactgagtagaaatagtgagcacactgattcaaagtaaggagagggcaggtataagatagctaaactggaaacaaagaaaaaaagcctagtcagacaaagtcaatcattcaaaagttacaacccatgtaatgtgtttttaaaaccacttgttttgtgctcacttttgacatcttcttctctaagctataagccatatacaccaaatattttttcacttgctctccatcttttttcagttcatcagtggccaggtaggccatgggaagggctccatgttgtgacaaatccaatgtgaaaagagggccttggtctcctgatgaagatgccaccctcaaaaactaccttgagaaacatggcacaggtggtaactggatagctctccccaaaaaagcaggtttaatttctttaatttattcatcactgcctctgctatctcttaattaataattattattttcgtagctagggaataaaataattcctctttttgtcatccatttggaggtttatcttttatatatatatatatatatatatatatatatatataaacctcggcaccttatgttggatattctacattagctaattatatatgggtaaaataatgtacgttaagtaagaagcaccctagtctacattggatgattggaaaaatgtgaagggagaagagaggggagagaggttataggttcaaatttctccctatttctaataagatcaacaaattaatatttgttgataaaaaaataaaatatgcaactctctcttcttgaattagctttgaaattgagttagacttcctcaaattgtaagactgtattatttgtgtgtatttttaggccttaagcgttgtgggaagagctgtcgtctaagatggctaaactatctcaggcctcatattaagcttggaggtttcactgaagaggaagacaaaattatctgcaccctttatgacaccatcggaagcaggcaagtccattatttttttttttttttatatatgaacgtattgaatatgtgaatatgcattgcttttgcattattattgctatatatctgagtaatgtgatggttttgccttcaggtggtcctttatagcagctcaacttcccgggagaacagacaatgatgtgaaaaatcactggaacaccaagctaaagaaaaagttcttggcaggaaacacaagtagtactgctgccacgacaagcaacaacaatgtcactttcagcaatactagttattctgatcaagttaagacccttgtcttggatcatcaaaaactgaactcagctgataattggtttgactactcctacaatgttttggaattggaacaaacaccaattccagttccttttccaatgtctcaggaattagaggcttttaattatactgctgggagtataagttgtagtgcaccaccaccctctaaggaagtttcaatgctttccaatgcagacaatcatacgctatggtttggttatgaccatgcaagtgaagatgatccaaatttgcttgagtttgtgcttgatgatgatctgctgaatcatggatttgtttctcaagacaaaagctgcagccaagttggtccaccatctggctaattaaccaagatcactcattctttctactcgtcaaaaacttgaaaaaaccaaggctacagaaaataaaggtaaaatggaatattgatcaagttattatagtatagtactagtgatgaattatatacctctaaatctaactggtgtttaaatttgtgattaaagtggttggttgaatgtggaattgtgtgagtttctgaattgttttcaaagttgaggattgtgatgttattagaagtatatatattagtcaaaagatatactgcatgtcttttctaatgttagaagagtctaaaaaatggaatgctttttaaggtacataaaatagtgtgggtctgtgggggcctcaaattcaaacaatgtgatcgcacgtggtcgacgaaaccaattttgttggcttctaagtggtcagtggtcacgaaacatgcgttggtccttaagcaatttccaaagcaggaaaaaaggggtgtctatctgacaataacaactacaatgcatgaacatgaccatgtgtctctattgcttcagaacttgcgtttgctccaaattgactgtcatttatttcaaggtgaaaaagaaagccaactttcttcacataagcttatatattgctgctttaaatcgattcacggcaaaaattgcttgtgcataataaacataaaaaggaaataataacttttccgtgaaccgtaacgaaaagagtatttttaaattagttaaagaaaataaagacaattttttttgttttctttttttacttagagaggagactaaagactagtgagagcaaactatgaaaatctttctattgtgaaggaacgcatcttttacaaaaaatagaaccaagttccaccaagaatagctaacacgagaagcagccacatggttggctaaagaatctgtacaaaagttatcttccctataaacattagaggaaagtaaagctatatgattctgtttacaaaaaaacaagcagttttgccacctacgaatattccatgggacaaatgatgagttcttcaaagcctgaatcacaagggtggaatcaaattccaaccaaatattgttctagccttttttaatagccaattccaaagctaaaataacaccaaacaattctacgtagagcgggtattgaactcccaaataagccaaaaaaacatcccaagaaagcaccattgtggttccacccgcttgatgatagaaggc

SEQ ID NO: 249 - DNA, 3970 bp, Glycine max
  source 1..3970: mol_type = genomic DNA
tctgcttttgcacatgaaatgggcacaattctaatcatttcccataatcatgactgcttttgttaatattcgacgcattatgagttcaacaataaacacactaagtggccctctctctctctctctctcctccaaattcaatatgactcagtcaccctaaaaataaatacaaaatatatatgcagacgcatataaagtcccttattatttgttcatctcgtcgtaacgtatgtttgataagaactttaagaaatttataagtttgtttttagtttttactaaattataaattaatttgatcaaaataaacttattagatacacaaatggaaaataagttaacctataataagtaactaacttttttttttctcctcaattttatttctattaatttatttttatttttttgtattctaacattcttacacgcatacaattcgttaaggttatattttttttaattatatcaagttttcaattatttgtgttttttcgaaattatattatccaattcgattctcctatatgattcccttgtacgacttgtatctagttatataattcctttttttttttatcaattcaattcccataaatgattcaattatagaaaaatagacactaaatgacatgtttattttcttttttattatcaaacttcaaattctactttttttttcttattttgtttaatgtaaaactatttatttggatgaattattacatttttattattttttcttaaaatatttttatcactaaaaaaagatgatacaaaatctaaattataagaaaaaacatttttactttaaaagtttgatttaaaaaaataaaatttaatttaattctactttcatttaaaaaaaattctgatgaaaattaatattagtttataaaaaattagactttaaacaataaaagtaaaataattgaatatgggagaagaaacaaaaaaaaatggagaggatggatccaaacccttaaatcacgtatctcccttgaaatgatgaattagagttcgattccaaactccattaattacgagtagaatgatacgtgtgtccccaaaacttgatttattgggaaatcaaaggaaaaaaaattgaagttgggcaggcaaacgaaatgagacaagttgaaaccctgagagagtcacacgtaaacatgcacgcgccatcaccccaacctctctctgttctcttcatcaaccctcactcatacattaccattagcaacggacagaagagagcaacaatgaacaaccctagttctccctctccctgcgcggccttcgcggacttctacgagcaatggttcgaggagcttcagtccctgatgcagcaactcaggggtgagggcagaaaagaggaggtgatggagaaggtgatgtggcaccaccagaactactacgtggccaagtcggcggcggcggagaaggacccactcaacgtgttcctatctccctgggccaccacgctggagcgctccctccactggatcacagggtggcgccccaccaccgcgtttcacctcatctacaccgagtcctcgctcatgtttgagtcccacatcatcgatattctccagggactccgcaccggcgacctcggcgatttgtcaccctcccagttccgccgcgtcagcgacatccaatgcgacactgtatgtaatattacttgcttactttttctttttttatcgctcatgtaagtgagtgaaactaacaaattttaaaatgtttaattcttttgggattatataaaactcatgtccacgtttttttaggtattattgctgccttttacattgaagaaacatataaatcgagcaaataaaatatttacttaaaatatttactaagttgtcattaattacatattagtgtaaaaaaaaaaaaaatactccttgccttatatatttaactggatttggaagttccttacatagttaattgagtttaacttgtttttaaagattttaaaataaagtattattttgatttataataatcaaaaataaaaatttctaaaaaaaagatgatattaaatgagattattctatttataatacttacagattatacctgatttttttttaattttaataatgattatattaaaaatataattaaaaatgagttttaattattttatcaaccatcgtaagtgtattttcttcagagaagaaagtgttcaattcagagaaaccaaatctaggtctaacaaaagagatttttcacttatggtgaaaaaaagttatgggcaaatcaataaatttgatattctaataaatgttcgtttattacgatcttaaataagatacaatatttttcttttgaaatattaacattaataaatattaatttggtaaaaaatgattcacgaagtggtcttttttttttttaatcgatttttttcaaggtgaaggaggagaatgcaataacggaggagctatcagagtggcaggacagtgtgagcgagatgatgggcccaggtgcgaacatcaacgacaagatcggacggctggtatgcatcataaagaaagcagatgatctacggctgagaaccttgcggagtgtggtggggctactgtcgccgcagcaggctattgagttcttgattgcatcggcggagttgctagttgggatacgcggttggggattgaatcatgaccgtccacgtggcagatgaaagtggaattgagtttaggccacaatttctctattttgattgaaattcattgtggccttaaaatgattgtgtattatttattactagttactagaactagaacagtccttgctgaacaaatatttctttttgctgattaaaaacaacagtccttcgctattaggctgcagcctaatccaaaacttttcttaatttaaattttaaagtttttttctatgttataatatcacatgcattattaaaaaccaataataattattgactgtttgagttttttagtccttgcaattgattcaaattctgatataaatataaaataaataaataatataagagaaagatatattcattttatatatcacggaatacattactaaaaatgtttctttatcatttaaaaaaaaatgttcagtatttcggaaaagggattattttgtatgagctcacggagtatattattacgaaaaactaggtagtaagagttttcaagctcaggtcaagaacgtaatacgtgtctctacgacaaagttcatgacatgcaaggtgacacctagcacaaacgtggcttctgggcactgcaaattatttattctcccctcagacataaaaaaaaacgataaaagaaaaacattaattagttgaattttgaactacagtaaaaatcaatgaaaataattttggtatactgcattgatgcaggagcagaagttttctctaaaaatgaattgcgatgacttttcttgcgtcttttaaaatttgtatgtataaaataaaaaagtgacgactaaatagagatatatagtgttgattatactatgtttaaataatggaattatgaggataattaaatcaattctcttgtgcggactagagagaaaataaattattagaatagtgagttagattttatttataatattaaaacgaagacaagtaaaagctgtattttcaatgatattaatttgacgcctttcctccttaaatttaactatgatctgccattacattgcatatacaaataaacataattactttattgattcaagggatgcacaagcacaatttcttatagatgtagttacgtatttctgataactttaatacatttcagtaatctaattataaaattgtataggtatcgtcgtcaacctgattaaaaatttagggaagttatgggaatttattaattcttttataacgtacctactggctagagacttcgttaaaaactcttataatatagtagaatataataatatttgaattagtaattgagaa

SEQ ID NO: 250 - DNA, 4068 bp, Glycine max
  source 1..4068: mol_type = genomic DNA
tgatttgagtcatttttaaattattagatattgattaatcaaatagttgtgtttttttaatacaaaaacaaaaaccaaactctttgggagagcactcaaaagggttaacacaactaagagaactagagtactgtatgtaaagagaaatctcccacttcctccctatatactagactccttcttacagtgaataattcatataaacaattaattttctcatcaaaggttactcattttaccattatttatgtcaaatcgtatatagcgagagtttaattttgatacataatccgaataaaaatttactctatctattaattaatgctcatgatataattttttaaagtaattataatacaagtcaatgagttcaataataatacaattaattttttaagagaataataatacagttcatgaataaatcagagtgctttatttatttattgtggtgtgtatatgtgtactaacacacttctaaagacagtattgttttagtagtatttaaaagaaattaaatgtcagttaaaataactcatccgtcaaatgttgtttttcagacttaactttcctcagatatgaagagtgcagaaggcgacaaccctccaaggtgagaaacagtagagagcatggaactatctatttattttaagttgacttggccacttaggcgaagatgaacgaagaaattgggtagatgaaaagaacaatgtcacgtaagcagtcttctatgtttcttggtttctctttctcttaagggaccaaagcgatcacgcggagtgaggtttgaaaattcatttgaagccttcaaattaaatgatgcctcgcaggatcatggaccctatcatttgaagtggactcggtcagctttcttattcatcacactattcactcatcaaataccggtcttagctgaaaaactcgcacatctcagtcaaacttggactttcaaccctccaacactaactcctcatttgccaccctttaaatacatggccttcattcagcaaaaaacacaccttacctttcactagcctaattcgctctcttctaccacaaaccactcaatcctaagaaatccatttgaaatttcaagtctcgttctggctaagtccatgttcattgtttactatacctcaccactccaaggttctcgtaattttcttcagcagaaaacgaaactattgcttccagagaagagcatcatctacgaccattttggcaatattataaaacaagacaaaaatggagagtgacttgagctgggagcggaacacactcatcaatgagctaattcaggggatggaggtagcaaggaagttgaaggctgacttgaagttgccgtattcagttgacacaagagatctgcttctgcagaggatattatcttcttacgaaaaggctctactgattctaagatgcagcaatgcatcaacttccgagttgcagggcatgaatcaagcaacaccaactttgctacccgagtccccattatctgtccatggaagtcctctgcgcgaggacgttcatggggccatcaaggatcaccataattcaaagaaaaggtgaatattactgaacagacttggtagctgtttcctggcacataaacatcagctatgtctggtaactggttatactatagctcctaacttgtatttgtgtttcttttttaattgctttcagaaagataacgcccaaatggatggatcgtgtaagagtgagctgtgagagtggtcttgaaggaccacatgaagatggttacaactggagaaaatatggtcagaaagacatccttggagccaaatatcccaggtgagagaacttccctcggtcctgctttaaaaagaattacaagttttcttaaggataaaattgccttcaccttggccagcttctaattaacgactcattgtgacaatttgcagaagttactataggtgcaccttccgcagcactcagggctgttgggcaacaaagcaagtgcagagatcagatgaagatcccacaatgtttgacataacttacagaggaaatcatacctgttctcagggaaacaatgccgttctgccacccaagtcaccagaaaaacatgagaaaccagcacacagtcataacattgacattcaccatgcacaggcatcacaagaaagccttgcaaagttcagaagtatcttgtctgtcaacacagataatctggacaatggagatatggcatatgctttcactttcccttccacttcatttggatgcatgaaacaagacaaccacagcttgattcctttggccctggagaatgactccttcttaagcgacctataccaaacacacctgttatccccaacaacaccagaatcaaattatttcccatctccaactttccagatgaatgagtttgatgggatctacaacaggtcacattcgaaatccgatatcaatgagatcatttccaccaacacatcagcaaccaattctccaattcctgatttcaatttctcacttgatccggtggaaattgatccaaatttccctttcaataccccaggatttttgtgctgattgcactataaatggaatactataagaatgtagtcttcataaaacgggacaatttcagacagcagtagaattgtagaataaagaatgagcaactgcagcacttatgaacgtccttgtagtcaatatcagaattgcaattttggctccgtgttagcaattagcagtatgcactttcaaataaaatagtttctgcaaatttgcattggtacaacctacaagacacgtctttagtagaagggcattaaagggagcagataaaaaattacacatcaaaattggatacgctggccaaaactctgtaatttcattccaattgatgacttagttacacaaatatccatatttatttacagcagccccagagcctgaaatgatacaaatatataatgatagtgacaaagtgacaatagaatggcttgtaacatgaaatctgcatcctaggattcttgttgttgttgttctactcgtccaagactgagttaggagtggaagcattttgatcttgtgaattttgagcttttctgagagcctctctgagacccaagacaatgaacaagttagtgagagtgaggagtgactcagccccaccacgttggacaaagaagtcccataatgcaccttcgctgtgtaacataaaaacaaaaatcaaacatccatccatcttctttaaatttatcatcaaattaaacatcattttcaacaaattaactcaccataaattccagctggtactgtttaattgtacaaggttcaaaacacagaaaatcagcaacgtttataagttaaagcaagtgataaaaataaatggagcaaagagatagagagagtgactagtggctccaacaaaggcaaccaaaaggagaagccgaagatggtgaggtttggagcagtcttggacttggtaatgaagtacaagaatcccatgtagggaaacaaggaaaaggcgaagagctgaggagcgatgctctgggagtcaatgatgatgcagaaatcttgttgttggagggacacgaggggaaggcttgttcactcaaactcaactctcttctattctatctcatcatctcttgcttctgcttgatgcatgcaacattgggaccgttcaacttccaaacgggctggcccatttactaactgctctattgggctatccttcatttgaaaaaggttacaattatttagaatgctggttgattagattacatgctgcaaatctaaaatattataattactaatttgcttacaatataaatattgatttagaaagttgcttaaatataaattaatcaaataaatcattattttagttttttaattaaataaaatgtaaactaacggggcaatcaaaatactactccaaatccggaaactacattaaatattggcagttttcgagttttgtttgacttgttgtaaattaactcacatttgaatatttgattcaacctacaacaagatggaccggactcccttgattggcacaccttatctttcttcataaaattagca

SEQ ID NO: 251 - DNA, 7877 bp, Glycine max
  source 1..7877: mol_type = genomic DNA
taaaataatgtaaattgttaataaatttaatattattaattatattaatcaactttttaaaggaagtaaattaattaaaagaatcttatatttagagacagaagaattaattgttattttttaatgtaatattaattatttttttaactttatgtctcttataatatttttaattttttaatttataaatgaattaacgatgatataaaagatttatttaataaaataataatattattatttatattttttctgcgtaaaataataattatttgagggcgagggagtataaaatatttgtatagcttctctttgtctctctaatataaatgtcattaaatggaagtggggcggtaaaactattgagcttataaaataaaataaaaaagattttgttgttgaatattgagccagtggacattgacaagacgttgttcacggcgcggtacttgcccatatgtgctactgtaaagctatgtgtgatactgtacggttcctcatacccccagtaagtacttctctctcagtaatccattccattctctatgttcgtcctatctatctcaattcttaattacatttttctttctttcaactaaacaaatattttttttctttaataaacacacatcatcaaaccatcaaaattagattttgtcatcatcgtttcaatttttgttttttccttgtatttttacgcgcaaaagttatatcaatagccgtagccaactaaaaaaagagaataaatagccgcgtgctaatatttgtatttggtagttgagggagattttttcttccttttcaatttttctgtaatctaaatctgaatttaattccctccaaaacgtggaagccatactggattttgccattcagcagcttccacatggcgtgatgccattgctccacgcgtcagtcgttgatggagccggcggcatcttatcccctgtatcctagacgcagacaatcattacctcctttcatatttaaaaactttagccgaggcatctaattccaactccagcggttttttccactttcatttgcgtctttctttctttctctgccacctcatctcaccggaaacacaacacactcacatccattactccatctccctcctaactaacaaacataataacttctccaatattccaataatcctttccccttcatttcacacttgacatactatttcttttattcatttattgtttttttttcactttctaatcccaacataaacataaccgtttttgtttttatctcacgccacgccctggttccagtagtgatcgccacaccgcgcttagtatgaagcttcacctaatccgcgccaccgtcatccgccgccacgttgaccacgttgaagaaccgctttcgccgcagtgatgtaaatatattctttctcttcttcttcatgcatcctttctgctgcgtgtccgccatttccgaccaggcctcgcctgtaaaaccctcgttcgcggacttcgccatgccgcctctccccgccgccgccgccgccaccaccgtgagatccgattcggctccgcgtcacagccacaagcacagccacagccacagcgggagccagcgggagcagccggtggtggacgtgaagatcaacgacctcgtcgggaacggaatctccggaatactgtacaagtgggtgaattacgggaaaggatggcgaccgcgatggttcgtgctccaagacggcgttctctcctactacaagattcacggacctgataagatcgtcgtgaatccagaaaccgagaaaggctccatggtcatcggcgaagaatccatgcgcaggatcactcgcaaccgcaattcctatccctctcaacacatacgcaagccgtttggggaaatccatctcaaggcacgacctagctctactcctggcaacttaatttcaattattaggtattttcattcggcgtgatttgtttgtgctgttctgtgattgtttaggtttcgacgattcgcgagagcaaatcggacgagaagcggttttcggtgttcacggggacgaagaggctccaccttcgggcggagacgcgggaggatcgggtggcgtggatggaggcgttgcaggcggtgaaggacatgttcccgcggatgtcgaacagcgagttgatggctccggtggacaatgtaactgtttcgacggagaagctgagagttcggctcatggaagagggagtgagcgaggcggcgattcaggacagtgagcaaatcatgaggactgagtttgcggcgctgcaaagccagcttgtgctgcttaagcagaagcattcagccctcattgacaccttgcgtcaattagaggtacgtctactcaaaactcaaaactagaaaacttcgtttaagagcaagtgtaattgtaagttgaatcgcaatcacttcagaatgggaactatacttactaatataagatgcttcatggtagtatagtttggtactatattgtctccaaaatacaaatatttaacctgtgaagtaggttatggtttgctggtagtttatacgaaagtcgcttcctagctctctctctttttttttttctctttgttcttgtgacttttaccgaccttgtcaataccagaatactggcataaattatagcttaaacttatcacgtatctttcaattgaaagctccttgaataaatatgtagtatgtctcttctcttgtgttcatttatcttgccaaaagttttctaccagtgaaaaggggggcaggcaattgactgttgctaaatgctgttccaaattttgagtgttctgaactgactaggtacatgtgaatagattaaggtttatatgttgccctcctttgtgtcctgcaagttgccttcgtgaatgaaaaagcagtttctttaaccttggaagacaatattgtgcagacccggaatgatgttgcctcatgggtgaaggagctgggtaggttcttcataggatgactatttttattaacatattttcgaattaaatctattaaatcctgcattataagggtttgcggtcattaatttaaatccattgaattattcaatgtttctttgtcattgtttccacattgtttaacaaaatgatttcatttgctattttttacatggatagtttattgtttattttattttaatgttgttttcttttacttttttaacatattgaccaaggataaatcttttttattttcatgtgtattaaaaaacatttatctatgttatattgtagacagaaaaggttgatctggaggatacagtagttgatgagagccaaagacagtggaatggtgaagaggcttcctcaagattagcacaagaaaaatttagtggtaagacttgaaacatttctgcatcagcagcaaggattatttagttgtgtcattgttttggtgaagcattttcttgaaacttgaattatttaggttccactatttctatctctgatatcccaattataacctaacagtgccttttatacattttattttgttttcctgtttttaattcagaaggaactgcaagtgaatctgaagatgacaatgagagaaatgatgctgcagaggaagaaacagatgatgatgacaatgccttttttgatactcgtgatattctgtcatccagttcttttaaaagtaatgggtctgattaccgagtatcatccttctcttcagatgatgaaggattctatgcatttgaatcagaggatgacatagatccttcgattagatatgttggaaccaattaccctcatgttaagcggcgtaagaaattgccagaccctgtagaaaaagagaaaggtgtcagtctttggtcaatgattaaggataatatagggaaggatctaacaaaagtttgccttcctgtttattttaatgagcctctttcctccctgcaaaaatgttttgaagaaatggagtattcatatcttctggaccaagcatatgaatgggggaaaagggtaagtctggatttggctgacaggtctctatttctgcaatattaagcaaatctgagtgcttaaatagaattgtttcatttgaaataagaaaatctgtatcttgactttgattttcttgctgttagctatttcaatgcagtattgggtgcattcttctcatttttaactaattggagatgtcatgcagggtaatagcctcatgaggattctctacgttgcggcttttgctatatctggctatgcttcaactgaaggaagagtttgcaaaccatttaatccattacttggggaaacatatgaagctcactatcccgataaaggccttcgttttttctcagagaaggtataatctaacttgacacagtgaagtgattaaaatattacatattttcaactctaccaaagtatattttcctttctgattgcactccaatttacatatttgtgaaatgggtcaggcaattggtatctttagaaaatctacaactgtgtggacattttttttggtcttaaatcagagttttttgaatgattcatttgatggaaattatatgtactaaccacatttgaattccttaaaaccacttgcttttgattcaacaaaacaatttgcagatttgtcttgtatttccttccctagaggtttcttgggttttaattgatcattcattcaccagtaaagaaacagttttccccaatacagaggatcataatttcagaaactacaccatttatttttggaataagaggtgtaatgtgagtgcattagttctggagaaacctatgaacacaaaacaagacaatttggattttggtgtgaacaaaaaggatatgatttggcttttttattttatgtcgcctattagaaattattaatgtttttgcttcccctcaggtcagtcatcacccaatgattgtcgcatgtcactgtgagggtacaggttggaaattttggggtgatagcaacctaaagagcaaattctgggggcgatcaattcaactggaccctgttggtactttgactttggaatttgatgacggggaggttttccagtggagcaaggtaattattatctgcttcaactgctacaatatcctgctttggttctaatttctaaatggacttgttctttcaggttactacatcaatatacaatctcatattgggaaagctatattgtgatcactatggtacaatgcgtatacagggaaaccaagagtactcgtgtaaactgaaattcaaggaacaatctataattgatagaaatcctcaccaggtgctttatatctgttgcatggattctattttttcacatttaatatattgttatttcctttagctctggtattaaattgtccttcttctttggtttgtataagacttaattgtcttactgtatagactcaatatgcatacttttgcactcaatagtgccacctttgctagtaaatggtcttttaatttaccatcttactatattatgatatatgaacttttgttgcagacgtttgtctcttaatgttgtttgcctgcatttctaggttcatggtatcattcaagatagtaatggaaaaactgtatcaactttgtttggaaaatgggatgaaagcatgcattatgttaatggagactacactgggaaagggaaaggtcatgaatctttgtcagatgcccgtttgctctggaagcgaagcagggctcccaagtttcccactagatataacttcacccgctttgccatcacattaaatgaacttacccctggattgaaggtgtgttttgttaaccaacactctcttttgttgattgtaatattcactgcatgcttcttgtgcttgattgttaaccaatattcactgcatgcaatttgtgcttgattgtgcatgctttaactggagttcacttgcaataacaaggggacactaattttttctcgacaaagatgaaatatatccaaaagaaggaacaaaatagtcctatcatcttactgtgcacattggggtgtgtgtttgctgtgtttctgccattttgttagacattgattgttgatttaatttgtgattttaaataggagaagttgccacctacagattcgaggttaagacccgaccaaaggtatttggaaaatggagagtatgacatggccaatgcagaaaagttacggttagagcagcggcagcgccaggtgcctgttacattttatgttctgtaatttttggttttatggtttcacttggcgcttggcacttaaaagttttttggtgcttcgaaacaccttttatctatgaaagggttaagagtagattgtgttcagctgagtaggctctattttcgaattctcttgattgattagttataccgtcgagcaaatattaaattagttaagtaaaatgttcataaggtgcctttgtggataggaaattggagtaaccgatatgttacaggattttatgtcatatatactcatccttattttagtagtttccgattgtgatgattgatctaacatttgtttgaatgtggttcaggctcggaagatgcaggagagtggttggaaaccacggtggtttgcaaaggataaagctagcgggtcataccgctatctaggagggtattgggaggccagacagcgaggaaactgggactcctgccctgacatctttggccaaattccttcggttcacatttctgacgaaggtcaaattacattttagttcttctaaaattttttcctcccaattttttttactgatgggtgtttctaatgactgcgatctcgctgttatgatacacccatgaaattcatgtacccaatcagatgaaaatatgagcgagtaataatgtaattctttttcttttcattgcaagtctatttatagaatccttattacttgcgagacacgtaatctttactgttgttatcatattatcatagaggcaggaatgcactaagtaatcaatattttgacagcacgtacgaagcaaaagcaagttccccgagtccctattgcacaccacaaatgacctaagcattacatggatctatctttttcgacaagcatttaataatgacttaatgcttggcataatcgcgtaagcaggtgtctgaggaaccgaaaatatgatttttcttatgtggcctatctccattcctggcttccatccttgatgtgccaaagcaaccataactccattttcaaatcccacatttttgtcattcatccgaattcctataaactttttgaactctttgggcgtctgattcatcttcagaagttgtatgatgttttatcctaaaaacatatgtacgacgcttaagccatcacctcggttcctgcctaatgtttctcaatgaatagatacggtgagatgatacacctgggaaataataaaaataattaatgttgctccatagaccatggaacacaaattttagaaacacattaataatgtttaacgatttaaaattaattttatcagaatgaatactatcaaattttaaaatgaaaatgatccctgaaattcttaaattgtgagcaaaactcctcttttcttttgtttttgatagaagtgagtaactgcatttaaagaacaagcaataatgcacgatacctaattttttgaaaggatatgaagatgaatggaaacagtgccacactttacagatgggacctgttgtccggtgacaccatcaacttagacaaattttatggacagcttttattggacagtttttaatctgataagttagattgcgacctgtgctgaaattgttcattacaaatttataatgctgatggtctatgtagttgtcagagtttatgtcccagtcaatttagaatttacactgacaagactaaatcccactgcttacaaaatcgtatatcattcaaactaaa

SEQ ID NO: 252 - DNA, 4141 bp, Glycine max
  source 1..4141: mol_type = genomic DNA
acaccatcacgcacacaatcgtcttgttttatggattcacttatcctttgtgatgtatatactggcgccaattattctctcctaaagcatatctgatttgtgatgagggtgacactcatatatcccggctacttaaagttttttttcaccagaaggaattacgatgcttgataaagatgactttggaattttatttggaaataggaaaagagctaaaaagcactcaatgtgccttttttatttgtaacgtgatttgattgacttgttcaaggaagccacatcttcatttaagaaatgttaattaccaatccattagtctaagagtttaacaattatgtttttgataatttaaaattattttatattgtcattataaattattgtttaaatttttttaagataattattttaaatgttaattaatttatcatatataataaattataattaaatatctgtgtaaaaaaaattaccctcggtgtataattatttttgtcttaatttaaacatttattcaatctattattagttaaaatttatcaaaaataataaattttaactaaatataaagtgtgtatcagaaaaaaatttattgagtaatatgaaactatgtgatctcaattaactttatatgatatataattgaagttattattttttctgataaattaaaaaaattgtatgcatatcatatataaatttttgttgttgctaacaatcttctcgttttattattaaatagaatatattatttgttagctaggggcgtgagttcactttcttctaaaagggtgtggtggtgggctatcttttcccttccatgcaaggacaaattctttgataaatgtgagagagagaaagacagaaatcagagagagagagagaggttggtgcgtggtttgtaaggtgcttgcttgtagcattttgctgattttaatttacagtgagcacaggaaagaagagggtaaagaagacagaagtgttaacagaaaacacaaacatgttcgatggagtaccagaccagttccaccaattcataactccaaggacctcacaacctcttcacttacctttccctctccatgcttcaggaacccccaataccaccttcccttccaattttgatccttataacaacccttctcatcaattgccactccaacccaacaacctcttgcacccattacaccacaaagatgaagagaaggaagaaaacacaaccaccgtcccaatgaacttcgaaatccaaagagatcaaaggcaacaacttcctgaactaattgatccctggactaccgatgaagtgcttaccctcttgaggatcagatctagcatggaaagttggttcccagaactcacttgggaacatgtctcaaggtaattaacttaattcaatcttaattttttttactgttattgcgtgcccttaactttttttttcttttttttctaaacaacgatcatccaaaaaaatcaacgcaataaattcgttatcagaaaaacaattatgagctgcactttgtgttgtgtttgatcagtgtggttgcatcgtatgcttaaaaacttcatgtggtagacaaacgcacacgtgcacctacactttagctaacacactgacaccttgacacacacacacacacacaaaaacacacaacccaagaggaaggaagggaagtattacgtgttgaagacaaaggtgctaatagatgctttcattccatggttgtgtttttttttattttggatttatataatttatggtttgggcgcaggaaactagcagagcttggatataagaggagtgcagagaagtgcaaggagaagtttgaagaagagagtagatatttcaacaacaacatcaattacgccaagaataacaataatagtaccagcaattatcggtttcttagtgagcttgaacaactttatcaccaacaagggagtagtggtgatcatcttgaaaagatgactcagccaccactgcagaaacaaggcaggatggaccaccatgcattagaattggaagaggaagaaggggattcgagaaacgttattgttgacgcatcggtgacaaaaatacaaagcgacgaggcacttgcggtggaaaagatcacaaaggaccgcaagaggaagaggtctgataggtttgagatgttcaagggtttttgcgagagcattgtgcacaagatgatgactcagcaagaagagatgcacaacaagctccttgaggacatgatgaagagagatgaagagaagttcaccagagaggaagcttggaagaagcaagagatggagaagatgaacaaggagcttgagatgatggcacgtgagcaggctgttgcaggtgatagacaagccaaaattatccaaatcctgaacaaattctcagccactacttcgtcccctgcaagccacaccctcaagaaggtaaacacccacatttcacaaaaccctaatccttcacaaacagaaaaccctactttaagtgttgcacaagacacactgattccttctacttcttctacttcaactccagctccagctcctccccagaaccctagttcttgttctctaaatagccagaataataatcatattaataataatattccagtagagaaaaattcgattttgaataaggggtcctcatcaaatgagaaagacgatgttgggagaaggtggccaaaggatgaagtgttggcactcataaacctgaggtgcaccagtgtgaacaacaacaacaacaatgaggagaaggaagggaacaacaaggtccctctgtgggagagaatctcacaagggatgtcggagttgagatacaagaggagtgcaaagaggtgcaaagagaagtgggagaacataaacaagtacttcaggaaaaccaaggatattactaagaagaggtcccttgactcaagaacttgtccctactttcatcagttgagcagtctctacaatcaaggaaaactcgttctacaatctgaaagccacttgaataatactccacctgatcagaatcccgagcaagtaaaaccagatcaaacaacacaagctcatgagtcttcttcgcaggtggggtctggtagtggtttcagtgttcagcaacagcaggtaccttctttggattttgatcagttttaattcattgattcacataataagaagtgtaccacctcttttttgtatttttgttttttggttgatgctggctatctttaatatagcatataaattgattgtgtatatttgaaagaacttagaatttggcgagcaccgacagctatagctagtttgaggaatgagaactattaatatttctattccggtgtaagtgttattttcatatatattctattttattttattttagtgagagaatcaattgatggtttcatatttgttttaatggggaagacattgaccctgtgaaaaaaataaaggaagaggaagcaaaacattctttgggacattcttcacttttttagctagggacttgaacaacaactaataaaagctaaggttaaaaaaacatcagtctttttcgtccaagtatacaaagtttaggtactcaaagctaaagtccagccaagataagtttttatctctaataatgaagacaatttaaattttactattctggataactttatcaccccccagtaataatgaattttgtactcaagtgctaggtgccacatccttaaaattttaaagaaatgagaaaaacgagtttgttttgtatgaatttattaatacaatatgaccaattgtgctttaattaataacttaccataagttttcttgcaataaagtttcagaaataaatgtatttacacaacaaaattatacacattttaaaaaaaaataccagagaaataagtaagaaataaattatataatgtaatatatatagagagttatataaatttttaaataattttattgtgtaaataaaatattttatatgttcatatgcatgttgacgtgcataaataatgtttgttactagaaagtagactttaagtagtaatatcatggactctagaaatttaaatataatattctaacgataagttgtgttctcatataatttaatttacataaaactaaatcatttagatttttcaaaaaattgaaggaa

SEQ ID NO: 253 - DNA, 3540 bp, Glycine max
  source 1..3540: mol_type = genomic DNA
aataatataacaaaaggtacataagacacgaatctctgcatggtgacatgcataaaacacacatttagcggtggactttgtttgtcactaaacgtttctagttttctaaatttttgaagcttttaattaatgcactactatatgttgagttgacattttatttacagagaaagattatgtatctatagcataaaataattttaatttattattcaattaagaattattattttaaaaaatattttaagagtgatttatgattgaataatattataaaattattttatattatcaaataaattattattaaaaaatttatatatttaaaatattaatgtatatatttttatattagttttttttaatcatccatggtataaaataaacattagtaaaaaaatataaaataattcatcaaatgatttttttaaagaaaaaaaattattatacattgacagtgcaaaaatttttatataatcatatgatgataattcattatgtataataaatttattaatttttaaaataattattttaaaacaataatttataattaaatgattatataaaattattttatattattagtatataaatattaatttttttaaatactacttattttagactattttgctcgagtaagatattactggtataaaacaatacaccgaattattattttatactaacatttatttattaaaatttacaaagaatcaaatcatgcgaatccctaggaaaaacaaaccgacagacagggcgccccattccaaaaccaatgtcgtaagcagtgacttaaacccacttcgtgtgggttctcgacacgcacgcaccccaattccacgtccgatacgtgtccatcctcgtcaccaccccacccaaactctacccctttttcttttcacacctcctataaaaccccccctctctctccagtcccaactttctaacgcccccaccaccacacaatttcatttcatttttccttttcacttcactttcccccaattttctttctcaacaatggccgcagcaacacaactccacttaccccctggattccgattccaccccaccgatgaagaactcgtcgttcactatctctgccgcaaatgcgcttcgcaagaaatcgcagttccaataatcgccgaaatcgatctctacaagtacgacccatgggaccttccaggtaaattaacaatacacaaacaaggttttaaatatcggtcatgatcgtgttacgatttaatcgcttttgtttgtatcgaaacaaattatgaacaaatacaatcgatgccgtctcaattatgattcagatgctggtcgtggacacattttttaaaatcttgcacaaattattctcataattctgaaataaatgataataacttttttttattgataaataatttaatatattctggtgttgtgttatgtaggaatggctttgtacggagagaaagagtggtattttttcacgccgagggaccgcaagtacccgaacggttcgcggccgaaccggtccgcggggaccggatactggaaggcaaccggagcggataaaccggttggcaaaccgaaacctgttgggatcaagaaagcattggttttttacgccggaaaagcgcccaagggagtgaaaactaactggatcatgcacgagtatcgtctcgccgacgtggatcgttcggttcgcaaaaagaacagcttaagggtatataccagtatgcgcccttttttctcttcactatcgaggacataatagacatttcaacgcacatttacctttcgaaaatcaccgttttaccctttaatgaatcacacctggccccacccccccttggcaagcgcgcagagaagcttcggtttacgataagttgataaggaccactcacagaaaaaagaaaaggaaaataattacaataataaatgttttcgccaaccaattattactttcctacatatggaaattattcgttctttcttatctctattgaagttagggatatgagaaattgaaaattaaaaaaatgtttgcacatgattgttgtttctgattatgcagctggatgactgggtgctgtgtcgaatttacaacaagaaaggtgcaattgagaagcagcaaccagcaccgccaccaccgagtggtgtccacaaaattgaatgttacgaaatggaagacgtgaagccggagtatacggcggcggattgcctgtacttcgaggcttccgactcggtgccgcggctgcacacgacggagtcgagctgttcggagcaggtggtgtcggcggagtttgcgagcgaggtgcagagcgagcggaagaggcagggcaacagcgagttttcgtataattacatggatgccactctcgggaataatcagatgtcgccgctccaggatatcttcatgtacctctccaggcccttctgaaatcaacacgcacgagacggcacgacgtcgttctttgctttgtgtgtgcatgatgcatttttgacgtgcctgctgcattgcatggaagcacgagactgagtgaatgtccgtgagtgtgtccgtgctggtgcgcgtagatgattattattataaaaaaacaaaaaaacaaaaaagagaagcattcatatatgaacatgatgaatccaactgtttacatgatctagtcgcaattaatagtttgatattaaataaattgtgtggaaacaaaatatttatcttatttgtctttaaggttttgatgaagactgttttttgacaaaaatgacttcgtactactattatgtttaaaaaaatatcaacatgaattatgagtaatattaatattgaatcattgagtatattaatgtgtgtctatacaatgcttaatcttcacacgtgcttattgtacatattgccagtttatataagaaagatgcttctagtaactgctgggattgcaataatttcaactgatacttcaaccattttcaagctataaaggtgtctaaattattaagtcatttttatttaacttttatagttaaaactaatattactaggaaggatcatggagacattaagagaactaaagatgaaacctgcaatcacaaataatctaaaaccatatagttttttggactagaaaaaatgatgtattaactttttgcatctcataatttacagcaatgcctttggccagatagcattccatgtctcgaatcatctcttataaaaactaaccatacagaacctacactagtcaaatttatttctgtaattagaaggtttaaatattttttttacaataatgcttttttttaggaattttataattcttaattaattaattaatatgggctacatattatattataatatttatattaattatttatagttagttgagtttaatataaagtgatctaatttgataagcctattagactgtcaatggaaaaattgatatgggcttaatgagtgaaaatgacctattaggggataatgagaaccctaataggttaaaacctaaggcataattatggttttcaatacaccaaatcaagtaa

SEQ ID NO: 254 - DNA, 3729 bp, Glycine max
  source 1..3729: mol_type = genomic DNA
taatatttatatactaatgatataaaatagttttacattttatattattttattatatattatttttagcataatttgtatatttctaaataattctcaataatagtattttttttcactattgaagtttgataatgcaacatataattggttatatttataaaaatatagacaatattatatgctactttgcaatcttattattattattaatatctttttatattattttgataactcttcaattatattaataatgtaattgttgatctcaccaataattagttaattctttttctcgaattaaaatcatgattattcaactgctttaaatatacgtgaataagctttaattcaataactgtggtctatataaaaaagagttcacttttttatagatatttttgttgttgaaaattttggataagtgatatatgaatttttgattaaattatttattggcttaagtagacattgactaattagtactccttcttacattgaattttttccttctcaattactagtatttttctattatcaatttatcaaataatttattaaattaaaatattaaaaaatttaattcacctaaagatatagtggcaagaaccttattacatctttcccttaaaaaaatcattacatataatcaattaaataaatatctatcgatagtataaagaattcttatactactatttaattgtaagttttatatatattaagtttgtaattttatattaattatttttaaaattatgctaataatattttgtattaaaattgataaaaaataatttttaatcaattaaatattttgactcagtagtaataagtattttttttttgttgaaaaaaccggactgcggcaagggcataatagtaacactgcttactcccccttctccatttaccgacatccgagagccttcatttgcattcaaccaaaacggacgcttttgttattcttcgtgtcttgttgtgtttttcatctgagatgtgtggaggagctatcatctctgatttcattccggcggcggcgatcgccgggtctcgccgcctgaccgccgattacctgtggccggatttgaagaagcggaagtctgacttggacgttgacttcgaggctgatttcagggattttaaagacgattctgatatcgacgacgacgacgacgatcaccaagtcaagccctttgctttcgccgcctcttctcgtcgtaacttttctctctcatttctttcttatgcaaaattatcactctttactctctttttgattttggaacattaaaaaaaaaaattcatgctatggaagtcaattttatttatcaccatgtgctttgattttcgtttacggagttgatcactgggatttcccccctcttagatctgcaataaactcttttattcggtacagatctcggcttgttttctggaatgatttgtttttcaggtagataaaaaatgagggaatactttttttttttaaaggagtgtgttgttatccattattcatacacgagttcactttcggctgattttaattcaaggatgactttgtggattctgttgaaatgatagatgcttaagaatgatgctgtttgtgtttcttaataacccgctactgcagcttctctttctcagtatagaggtacttggatggcaaccttttgttcattgctaaaataaactttacttgtttgttgtccatgttaggattctttctgattcccttttaaccttgttgagacttctaatatcctcaggtttttttggggggagaattggggggaaaaatggttatatgaatccgtgtttgtgccttgatcttatttttattatctttgtttaatggttctgagtttctgttcttaccgtgatttttacacttttccaattatatgaaagtgtctacggcagcgaaatctgtggcattccaaggtcgggctgagatatctgcaaatagaaagaggaagaatcagtataggggaatccgtcaacgcccttggggaaaatgggcagctgagattcgggatccaagaaagggggttcgtgtctggcttggaaccttcaacactgctgaagaagctgcaagagcttatgatgctgaagcacggaggattcgtggcaagaaagccaaggtgaattttcctgaggcaccaggtacttcttctgtaaaacgttccaaggtaaatccacaggaaaatcttaagactgttcagcccaatctgggtcacaagttcagtgctggcaacaatcacatggatctggtggaacagaaacccctagttagccagtatgctaacatggcttccttccctggcagtggaaatgggctaagatcccttccttcgtctgatgatgcaaccctttacttcagttcagatcaagggagtaattcatttgattatgctcctgagatctcatccatgctttctgctcctttggattgtgaatctcattttgtgcaaaatgccaaccagcagcagcctaactctcagaatgtggtatctattgaagatgattctgcaaagacactctctgaggagcttgtggatattgaatctgagttgaagttctttcagatgccttatcttgaagggagctggggcgatacttcattggaatccttgctatctggtgacacaactcaggatggtggaaacctcatgaacctttggtgctttgatgacattccttccatggctggtggagttttctgaaccgctttttctttggtctccctgtgtgtaaataaagctacaagttgtttttctctgtttttgatttttgttgcatttgttgttctcttgttggacacatccccccatgtgtctgaaaaaaaaaatgtaatttccatttttgttgctttctggaatggttgtcatccgtgttgaagatggagttaaaacaattaactcgctcaagcatctcttgtatctaaagtatggggctatatagttatttaggtgtcctttgccttgtcaaaggccttagttttggggaaatctcgattgttgttcgagggtgattatatatgatctgtgaaacaatcttggctgctgataatttttaactgggttgtttctctatggttatactcctatgacaaaatttgaatgatgaaacaaaatgtagctgtgtgggagcatcagctggtgacacggggcatgggtcttgaatcttgattcaagatagtggcttcggtatacgttaaaaacacattgaccattgacctaaaaaataaaaaagcagctttgagaaacaaacttctattttcagaagcttaccatgggattagggagatttggagacgcagaaaaaaattgcacagaggattttattattcatgtgcctcatttgatccaagaatatcaacacaataataattggaaaagctctcatgtcaggttatcaacgccagtagaagaaactcggctgctgagagtgctacacacgatctattaatattgtaattcgtaattgtaaatgatgaataagagaaaaaaatgttcatctaacgtaacactcattttattttgagttgataaaagtgtgaaattattttacatcagtgcttaacttttttttcttttaattaattaatttcaaaatttcagaattaatcaacttttatttataagaagttataggattttataattgaaaagctttaggtaagtaagaagttaaaacttagccttaaatcctatatacgggtaa

SEQ ID NO: 255 - DNA, 5866 bp, Glycine max
  source 1..5866: mol_type = genomic DNA
tatatttaataatcaatcaattattacttatgttaatcgttgttagtttttgaaaaaaattgttcatgatttttatagttacaaaaatcttaccttttatttcttacatttaaaaataatctattttaatccatttacaaatactttcaagtttgttttggtcttggagattcgagtaaaagcctaaaaggatacagtactacatagcggaaaagaagaaagccacactctgagcgaaattaaatcatgacacacaacacccggtcacccggtcacccggtaccgctaataaattttagtagttgtttgttatctggtccatttcgattgggtgaatcaaaacaacgatatatttcagttgacctccaatgatacgtgtcactcgtcatcaatcgatcaatgtccaattataaatcaagatcaacgttgcctgatttgattaaataattcatgaataattttattgagagacaaaatctaaaattagagattaaataagagattaaatttacaattttacttataaaaaaatgtaaagttcatttaataatcaagataaaaaaatatgagatagtaaagtaagagtagaaaagaagattagcataataaattccctaaatatttatggatccttaaaattttaataaatattaactttctgattattcctaaaaaacatattttatttttaattttaacttgtgtcgtaatcatagcataattaaaaaaaaaaaaacatttgtaaatagtctcgtcgcctactacccattctcaggtacccacgttctcaatatcactaacttaagttcattatctctacctacttatttaaagacactacatcagtgaacccagggcagttgaggtatttaattaaaatgtatgataatattggtggtaagttaacgtttaactgtttaaggaacagattctagaatttcttaattaagtgtaactgtatattcggcatataaatatgccatgagggcaagcctctccgagtacatcttaatttctccctagctttgcttatagttcctgtattaatttttctctccctgagattaccaagctctgcaactttgcttctcaacatggagtatcgtctcctacccatttttactttactcaatgttagcttcagcatccaaacaactgtagcatgcatgcttattaatactttatttaaagttatggtttccttttaatataaaagctcgatttctatttagaacgggaattttcttactatagccacaagagttataatatatgggatttattttttataagtggtaaagcattttctggtattaattaattttatcacacacacacacacacacacacatatatatatatatatatatatatatatatatatatatataatatgatcaattacgacaaattaatatttagcactgtatcttatatatatatatatatatatatatatatatatattaagagactgtatcacatattattatcatgaaaagaataaggccaggtgctgcataatctgtttggaatgtattaaatgtttaattacgagatgtttttgtatttgacttgacttgcagcttgcactggtggcaatccatgctgctttacctcctgaagtttactggaagtcggtgcttcctactacgccaatgccaaaagccatcactgatatcctttaccccggtcagtgcaccatagtataaattttaaactaaggtcgatcatatgcaatgttacacatacaatatttgaaaaataaattagagaatcttgataagaaattaatactcaaggaaccactttaattatttgaaaatgaaaataatactttttatgttatcaatatattactattttttaatgcttccgatttttaaatttattaataagtgctattatcatagtgaattttttctattaagcatatacactagtatataataagtgtagctcaattaataacaaacgttgaagttgtcaaaaatgatctagtaaaacatgatctaggtttgatttttataaaatatattcttggaaaaaattaaaaaaaaatatataaaatatttagtcatatagccgacttaaagagctcgaacttacagaaatatattaaaattttagcatggaaaacctaacgtctactaattaattaattaatgacggtggtgaaaaaaaactatttttgtatatagttactggtagtagcctttttctattataactttctcttatagctattagatcccgaatattaattgtaattctggttagttacatgcatataaaaaccccatgcatgcataatcgtatgtgttgaatgacagtttccattctcgaattggatatctcgatctgcagtctgcacgatctctctcttcgaggtccgtgtttatattcttttaagaaagaaaaatgtttatgtaaaaaaaatagaaaaatgtgaacatatgttgattatgttctttttgattaatcaagagtgtaattgaatttgaatattttgactataagtctcaaatataaattttgtaggtaaaaattataattaaaaagagaaattttactaaaacttattagttgtatttttaaccgacaaaaagattagtcgttgaacaaactatgatactatataattataatatgataactattttttttttaaatgagtcgtacttatagttctcgcttatatttaaatgagtcttacttttaatttttaaatttcgaacaaattttgattaatagtagaaaatatattaggatgagtatatgctattgttaaatctcttatataggaaaatattatacatatatccttttttctttttctttttttatctttctcttggttttttttttattgtatcatttgtcacatctatctatttatcttttttattaattttttaaaaaatttagacaattgaacattaattgtataaaatgttttttaatcgatctttttaacatataaaaaattaaaacttcaaatgtatttttactattatatatatataagatataatatatatgtattataattttttaagaggcatgtatcagagttgcttctttagaaaaaaagaaattaccttaaaaggataatttagacaaatatataaaaaaagtaaaaagttgcttattttattaaaaaatattttttttataaaaacaatcttaagtaaacaagcccaatagtaaaatattatatatatttaacgaaaagttaacaaattttgacagaaaattaaaaactggagaaaagtattagacactctaatgtatcagggagtgaagtgcaaataatgtaagagaaataacaatgtaatatttgtatatctctatggagaggagtgtaattttccgtatattaatggtaaaaaaaatgttttaaagtatttaaaatatatatttgttattgtaactctcctctcaacttgcatgtttgtcccaccggcacgacttatatgtacaacttcactatcttcacatgaacagctaaatcgacacattaataatcggacctagtcaccatgctctcattttcaaatgtgcaataatatagtattgtgaaaaagaaaggtacagtcatacatgacgtctttagtaggggataaaaaaaataaacggtgaatgaagatatttaaaaactagttgtgtatacacgaaagtaacagggcattattatgactcgttgcagatagaatatctagtttggcttatgatgaagataagctaagttaatttataattttaatttgcagattgggtggaagagaaaagtacctcagtgaatgttggaggcaagggcgtaaacgtgcatgcaggaaaaggaggaggtggcaccaatgtcaacgttggtggaaaaggatcaggcggaggcgtgaacgtgcatgcaggtcacaagggaaagccagtgcatgtttctgttggctcaaagtctccattcaattacatctacgcttcaacggagactcaattacacgatgaccccaacgtcgcactcttcttcttggaaaaggacttgcatcccggaacaaagttgaacttgcacttcaccaccagttccaatattcaagccacattcttgccacgccaagttgcggattctatacccttttcatccagcaaggtggaggttgtattcaacaagttttccgtaaaacccgggtcagaggaggcccagatcatgaagaatactctcagtgagtgtgaagagggtggcatcaaaggagaggaaaagtactgtgccacttcgcttgaatccatgattgatttcagcacttccaagcttggaaaaaatgttgaggttgtgtccacggaagtagtggaggacaaggaaacgggattgcagaaatacaccgtagcaccgggagtgaacaagttatcaggggacaaggctgttgtgtgccacaagcagaactacccttatgctgttttttactgtcacaaaactgagaccacaagagcttactctgtgcctttggagggtgctaatggggttagggttaaagcggtagcagtgtgccacactcacacgtcggaatggaaccctaaacatttggcctttcaagtgctcaaagttaagccaggaaccgttcctgtctgccacttcctacctgaggatcatgttgtttgggttcccaagtagatttgctttaatttcaagtccttctttcctgttcttgaataacttagcttcagtagcactacagaactctatatatatgcatgtatttgcactgtgtagttctctagatattaataattttttgctgtttatttagatgctatgcgtggcttcttatgtataaactatgatgcattatatgacttattgtgtgtttgaatagtaaatcgttgtagatagtacgtaatgcggcgtcctcgttctcttattttgatgagagaaattgttgttatgttaatcacgttatgtgttcaaatttgccgtgattatatatatatttgctctggatcccggataccacacatcgacctgttgaaatcccgggtgaagaattttgttattgtggtggtgaaggaaacctacttgaagtttcatacatgaaaatttgtagattatctttccaatcaaaatggcttaaattttacaataaacagatgcctaaatcataagaattaagtggcatgttaaacctatgtcgcagaaaacagatttctctaacccagaaacttgaccaagtttattctcttttgttcttgatcaaaattaaacaattttttaatgtgcttccataatagagacaacccgaatctctcaaccaattgtacaaaatgtgaaggcaaacgagagattgaaaaaattggattttatacaatctgcaacatgaaaatatttgatcatcacacatttttcaacgaaattatttgattttttgcaattgatcaaaactcataagataaaaaattgtcttaatcaattttaaccttatttgcaaaattattttaatttttataattttgaaatattatcaaggctattaaaaactatcacttgttaattgaacaaatagaaaaacattctagactataagtattattatgtgacaatttttaattactattatattaaaactatcaatagcgttaattctacaagatagagtgaccaattattgaaccaaatgtaaatgataaatgactaaataattttttaaaagacaaaatgattaaattagctagatctaaacaaaaatataaaaaattaaaagtgtaatttagtcagagattttgaaatacttactttgaattcttcattagtttgcttccctaataaattaaactctaaaacaagtcagcaaaattttacgggtaattatggtccttctcagtg

SEQ ID NO: 256 - DNA, 3559 bp, Glycine max
  source 1..3559: mol_type = genomic DNA
ttatttaaaatacttaatttggtctccaaatttttaaagctcaaatttaattctctaatttttacaaatacctcactaggtcccttcgattcaatagagattgaatgcgttgagttgatgtacacttggcatcctctggttattcgcaatgttaacgaccataaacatcacataaaaatgaaaaaataaaataaaatgatacacaaacccatcaaacttttttttgtttttttttttttggagcaaattaaaaactactggatcggtaatgattaaacaagtaaaactataaaaaaaaacttgtaacagccataattatttttttagctcctcgctagaattccagagtattttaagctatgagattaaaataattatgaatacttttgtcccaaattttaaaaacaaaaaagataaaatatgaaataagataattaatataacaaatgaaaaatcaagtatacaaagacattatataaagtatttataaaaatagcatagttcaaattaaaaactttttttaatcaaaaaccttttttcccgtagcactaaattcttccatatcatcaactatttcaagaaacgaagatttaataaatgttaccaatttattttattattttaaaataataatgttatattagtaaataaaaggagttaataaaattaaggtaaaaatatatttataatactgttttttgaggtatatatttataatactaatatattctttttattgtaaatttcttaactagtatttttactttggattcttttgctgcaaaaataccaaacccttaataatataatattgaactttatgggattcgaggaagccacctaccaccacctccaccaaacaccagtcccccgaagttgaccaagcgaatccccacaactaagtgcaagacaaaaaaaaactccaaattccaacttctcttctctactaatccctggatgctctctctataaaggccaaactcacaaaccataccctaacaaattgaccttattttgcaacaaaattcaattttgagcactaaccagcaccacttccaatggcttcaaatcatgaagaagtgatacttttgggcaagtgggccagcccatttagcaacagagtagaccttgctctcaagctcaagggagttccctacaaatactccgaggaagatcttgctaacaagagtgctgatcttctcaggtacaaccccgtgcacaagaaggttccggttttggtccacaatgggaacccattacccgagtcacttatcattgttgaatacatcgatgagacatggaaaaataatcccctcttgcctcgagacccttatgagagagccctggctcgtttctggtctaagaccttagatgacaaggttagcaatcttgctttgttcttttcttccactattttgattattgcatatttggattagtgtttttttttttttcacggaatgtttgaattagtgttgaatcatgtaaaattcaaatatttagtagattttaggtaaatatttgtatatttagtttaaaattgattgttagttgaattaatttaagtagtctttgtggtggataagaaattttatattgagttttattcttaacttgttaaaaaataaaagatctacccataaatcatttaacatcaaaaccaattgtataaattaatttataaggctctatctaaatcattgaggtatcaattcaatccaaatttttatttcttaaaaaggacgtccagtcaaacaactttctaaaagagaaaatttaagtaaagattttggaagtgtttttagtattgtattttaaataaataaaaattagttattctccgataatttaaataataaaaatttatgtgaaagattaatataggtcattagataaagctttaaatttgactagatgataacattaaaaacactaaaatgcatgtaagtttagtacttttgaagagctaaaagtatctctttttagcaacaaagatctgtaaaataaagttcttagaggacacttttttaaagagaagtgaaagagaaaagtatggctaaagcaagcactactatagggtagagattttaagttgtcttttttggttttagatcttgcctgctatatggaatgcttgctggagtgatgagaatggacgtgagaaagcagtggaggaagccttggaagcattgaaaatcctgcaggaagcactgaaagacaagaaattttttggaggagagagcataggattggtagacattgctgccaatttcattgggtattgggttgccatattgcaagagattgcagggttggagttgctcaccattgagaaatttcccaagttatataaatggagtcaagagtttatcaatcaccctgtgatcaaggagggcctgcctcctagagatgaattgtttgctttcttccaagcttctgctaaaaagtagagtcgttttagaggtaggattcctaataagttagcatgattttgttgggaaataatgataatcttgttgtgagtaaaagattgttctgttttaaatttaattgactgtggtattggttgagggtattggctattttaattttaactataaaaaactggtgttctgtgttgttgcctgatttctcaactaaattgaaccaagctaagaagttgcccgaatgggtgtgcaatataggattttggtgcaagaggaatgagtgttgtgcttaaacctttcttcattattaatgttcctatctcccccatctctggtgtctggtgggaataagacacaagtcaaacatcattagatattgtatctgctctttcatgatcatttatgattgttcacaaaaggtttctccaaggatgagaaaacactaggtgaatacattgtccactaagttcccaatacattctcttaatagacaataatttcatgatttgatgtgaactttgtgtagtcttttacagcttaattatgtttttttagtcccattgagtctattttttatattccctcaaataaaaatttatattttttagtccttcaaattaaagagttttttagtcctcctcttgaacaaaaatttgcatcttttagtccttctaattctggcaaagcaactaaaaagaatttttttttttttaaatctgacggactaaaaaaatacaaatttttatttataggactacaaaaatagaccctctaatttaaggaattaaaatcataattaaacctcttttaatatgagtatgggactatgggttgcatgatgtaagcattcatatgatttgagctcaatcccaaggttacctgggtggtgcatagggatggcgagtctggatatgtattataatatttgtatatgctctcataccctcacatgtagccacttgtggaagtatgagtgtattggtgaaaatctcatcggtatatattttctcggattttccaacacaactttaattcttatttccctactcgttaggtacttgtatgctcaaacacactctctacctgcatttttccaattataaagttaataaattaataaaaaatattaatta

SEQ ID NO: 257 - DNA, 3685 bp, Glycine max
  source 1..3685: mol_type = genomic DNA
ttattttctctcatttttcttatgtctttttgagtttttatagtactactcgtactacgatatagattgaaatataagtaagataatcaaatattgtgctaattaaatttttttcacatattaattaaaatgataattacttttttctttaaagttctctgctcacatattaattgttactactttatatatttttttacttgagtgttaaaattcgagggatgtctctttttctacaacaacattgactcaataaatcatcattcttctttgtggtatcatgtagtgtttaattggaatttggaactaatgaagaatcactcatttataaccaaaacacaaaaacccttaacattcaattaatcattattgtaatagcccaaaaatgctgaataataaaccgtccatcccatttacttataattaggtaatttttcattttaatacaaagtctactattataaataaggaggtatatttataaaatatgtttgcataggagtgaaatccaatataatcgacattcaattcaattaaactcaaagcttcaacatattttctttaaaatttttggatttagaaaagtctaagaaacaaacgataatgtattatataagaagcaactataggggtattgaattttagttggagataagaaggaggaaggggagagtatcacgacagtcaaagaatggatgggtgatctgagccaaagtgtctcacctcacgtgatcggtatgccttctgtcctcacacgtgtccttttattatttgccttaatactgccacatttcatatgtgtctcctatctacacacatcacgtcctcaaaggctaacccaaaataatattaaaaaagaaaatcacacccaggaattaaatagcatttaaaccgggcgttgtaaattgtagtaatgtaacttatagatccgttggatcctataaaataggtttcaggtaacaaaagacacagtaactttttttatccctttcttccttccatttcagctctcttaccttctgcaattctttgctagagagcacagagttgttagttagttcatccttggcaacagttattattttttttttttcggtcatagaaactgttaaaaattaaatcctctttatttattttatccttgtaactttagcagaaacaaaaagaaaataacttttccttcgtcccacaggctccatgtgctctggtgttggtgctatacaaaatttcttgttgctccacgctgcaagaagtgaacgcacactgttattctctccttttaaacgtaactttcgttgaaccttctcgttctttaatgtagtaactttagaagcagtatttagcccgctttgttttctctctgacgtgttcactcctttctcttctcttctttatttatattctcccaccccttccccccgcccgtgtccactctccattctccaaggaatctctctctctctctctctttctttccctttttcactttctcattcattcttattagtatttctatttcacttcaccaacccactccaccgtttcccctttccttccatgctattatggcttcatcttccatcaaacacactcaccaccttaaccgcacaaaactcttcatgaaagaagaaacccttttgaaaaagaagcatcactatcccaaaatcatacgaatacgtgtcaccgacgccgacgctaccgactcctccagcgacgacgacgagccctccatgtcctccacgcgccgcagagtaaaaaacttcgtcaacgaaattaccatccaaggcggcggcggtggtggtggcgacgttaacgttgtttctaagaaaagaagattcaagtccggtgccggagctccgttatgtcggcggaagacgggggcgaagaagttccggggagtgaggcagcggccatgggggaagtgggcggcggagataagagacccgtcgcgccgcgtccggctgtggctgggaacctacgacaccgccgaggaagctgccattgtgtacgacaacgcggccattcagctgcgtggcgccgacgcgctcaccaatttcataacgccgccgccggagaacagaaaaaccggttactgctccggcgaggagtctcgcaacaacgacgacttgcgttcccccacttcggttcttgggcgctgttcggtgtccgaggaagctgtaactgcaaacgacgtatttggaggctctagtgagtgcgagtattcatgcgtttcggagtcagtgtttcctattcctaacgaggtggtgtttgactttgaaagcacgttagatatgtttgatgaagggattaataatgttgtggcagagactagtatattcttggcggaggatttagatttgggttttacgagttggcatagagagtgtgataatttccaagacattgggggggatttgtttgtttgggatcctcttgtcgctctttgattgagacacagacaccattctctcgtctttgtaattctattgccaacgaaaatgggttgctatcagttttgtttcttttgggggtttaggcaaaaaccttgtgtctaaggagaggttttctaattttttattctagcagtatatgtttattaaccactagttgtaaaaccgtgcttcccacggtgttgccgtctttttgtttcttatataaaattatgtctcataagttacccttttatttatttatttttcccagcaaatggtatagtttaccttcttggttcacgagttttgtatgtaaaaaacaaacaggcattgctcatagatatttagaaacgttcgtcccatatattaatattcacaaccatctagtggtctagagcgtttaattttgtctttacctgactagaagtgttaatttaatgggattgtttatttaaattcaaacttaatcggattaaaacttaatagtcacatttacgatttatttattttattaaaattgttagaaatttgagatatttgaatcggttacctttttcattcttttactcttctccaattagttttaataccagtaaattataatattatataaaatcttattaaataagaagttagtattaatatatacatttttttatctataagaacgggacaaccatcaacacccgtacatccatcaacgacatattagtattacaatttgtacggacacagttctaccgaagtatatgtttttgtcactgtgttagtataagaaatgatttttttttatctgattttgaaagattttttattttctaaaacttatttgttctttaagtatattggaaactatttgtctcctaaacacattttttttttttaagtttgtctcgagaataattgagtaagacacttaaaaaagatagaaaaaggatgagaaaatatttctcaattgatttttttttttggattttaaaactagataaatttctgatgataaattaaccatttatatataggaataaacttgtagtatcctttgagtttatagcatatcttattatttttttacccttggtattttaattaagattcgtttctatcctctcacaaattaaaccgaaaactctagcccctactatatatctctcgagtcacatatctttccttgtagactgtagcatccaaccaccaccctcatcgtcgttagtctcttggccactgcttttagtggtatcggccttaatgtg

SEQ ID NO: 258 - DNA, 6280 bp, Glycine max
  source 1..6280: mol_type = genomic DNA
tgccataataaagtgctacgtgtttggtttgtcagccattctcgacttctggtggtcttagttgttggtatctttggttctcagcatggacaatgtgagtgattacttgattatgatattttagtgttatgctatcgtacaaaaccatgagtttgtggcttccaagttttctcctcgttcaatgattgttgaaactacacatcttttttctatatatcatttcttaaattccattttatacttacagcctctgcctttgttctcatttataagaaaaaaactcaatttcatacttattaaaaaaattagttaattttataataaaattgtgttaattttaataaaaaaatatttttttcctaaattatcctttattgatatttgttatcaaacataaatcccatattaaataaaatttattttaaaggtagtctcattaaatgagacacaagtaattaaattttgtttatattaaaaaaatcattgaatttttccttcttataaatgaaaacagagggtatatgtatttagtaaaaggtcaattgatcatgttagataacactctgctaatgtctgcagtacaatgtccgaatgtgataacctcaaaaaaataaaatagttattttagattttgaaggaggaaaatcaaagacaaaaaatattttataagaaccaaaaccaaaatttgttcatttataaggaccaaaaataataatttaaattttagagaataaaaaaaaataaggactaaaatcaaaacatgctcattttatatgaaataaaaatatatttaagtttatatatatatatatatatatatatatatatatatatatatatatatatatatatatatattactattcttatttttaacaaatgagaattcttttttagataactaataaagtttattggagaaattgaatttgagagataatttgaaatcctcttatgtatataaatgagaaacttcccggaaggttcccatgattatctacatttcaacttccatacaagtttataaatatacatgacgttccttgttaatttcatgaagaaaataatacgtgcatacatagctatctatttatctatagcaagtgcgtcaagagacacgtggtaccctagctagagtgccattctgtggtttctttctttctttctttctgcatcacatcacaatttgcattgcctcgtgtcctttttcttctttgctctccaaaaatctcacacacacaggtatctagcaaatgggttctcaccaacaagaaccatggctattggagaatgggaaaccaagggttttgaccaaggagaccaggcatggccgttctgcacacagaatgtcctccacctctttgcgcaagaaatctagccgaactcttgtctcaaaggttccatgtgccactctcagaaaccttctttcaaatttgcaagaggttattcttggcaccaagctctccattctcatccctgctattccagctgccatcgttgctgagtgctttggctttggaagagtgagtccctctcatcatcactccacttaattagttgttattgttgttgcacatgtttgcattgttttctcagtttcaactaactcaatcattcatcaactcaactaattcaatcattcaaagtaattattaaaatgtgataaataacttcatcttttaaatataagatcagtaggttaaatttttaaatggtatatgaactgataaaaaaaaaattattagaaaaaatcagtttcttaaatgaatttttttgatacttctacagatttgtctttaatttttatttgagaatgtcatgagtttacactcaagaaaaatcgttttcgtgtaattattacaaattaaaattctaaagaattttttgtacatgtatagctactctcgtaatgggagtctcttgcatgaggttgcccttgaactaattcaactcccacacttattcacattcaatgagttgtagttggatggtccaaaccttgatcttcctcgaccgtgacaatcttttatctgtgaaagtgaaagcatgcatcaaaaaaaaaaatcatggtcaactaaattaactaatattgagtttaaaactaacttggccatattttgaatacggcacttaaattaattatgatagagtagggcggttcttttttttatcatttaaagtttgtttcgaactaagatggttacgtgaaagttgaaaattctataaaatttatgaaatgtttttcgttaaaaacaaattttaattgttgcagaatgatttttctattgctcatttgccgcaattacgccacgattattgacgatcctctctcttttttttttaatattattattattattatatcaaacagccttggatttttatattaagcttacttggacttacaccacttgctgaacgtgtgagcttcattacagagtaaggaacctcgatgaacttgttgcaccctttcttttctttggatgatttgttatacaacaagcttttgtttctgggttgattgctgatactttttctattttctctgttggtgattgtcccttcaaatgtcgcagacaagttgccttttacactggtcccacaggtatgaatctaaaccgaaaaagtgtatcaattttggagaatttatcaccatgaaaatttcctttaatagctaatattttaatttggaacataatataattaatatttgattgttgtatcaattttgaagtttataaacatcaagagttaggactattttcacattattgcaccaatcgaatgttctagactattggttttcgagacaaaccatgtgctacttgtgatcttggaaatagtaaaatcaaagggttaaaactagaataagaaagcatgctgctacaaactgctgagtaaaattgattatggcataactgaagctaattaaatgttttactttttctcaattacagttggaggacttctgaatgctacatgtgggaatgttactgagctcataatagcaatatttgcccttagcagtaacaaaattgccgtggtcaagtattctctgttgggttctattctttcaaaccttcttctggttcttgggacctctctattatgtggtggcattgcaaacgttggagtggaacaaaaatatgatagagtaaggccctaaaaatcccttcacagtttcatctaataatgtgtgcacatttttcataattagtcctttatgtttttttttaataatggaacaatgatgactaattttaagcattgaatctgcagagacaagcagatgtgaactcacttatgctgttgttgggattgttgtgctacttgcttccaatgctgttcaaatacagtggtgcctcagctgctctcactgtagacccttcactacacttgtcaagagcttctagcattgtgatgttgattgcatatgttgtctacattgtctttcaactgtggacacacagggagttatttgaagaagaagatgtaaggtttcttgaattatgaaaatggttaattaagttggttagcaattaatctaatccttgccaatatcgtagaagtaattaattaattaattaacaccatgaattgttcaggacggtaaagatggcgaggatggttcagaagaacaagctgtgattggattatggagtggcattgcttggttggttggaatgactgtattcattgctgtgttgtctgaatatgtggtggatacaattgaggtaataattgacataaaatgtttttttttcttcaaaaaatgaagtccatttagttttgactataataaatattgatggtaattaatattgtcaaacataacaggatgcatcagattcatggggtttgtctgtgagcttcctaagcataatcttgctaccgatagttggcaatgcagctgaacatgcaggagcaattatatttgccttcaagaacaagctggtgagaactgagagagtgataatattatcatattggccaagcaataaatttatttaattaaaatgttaatttagttaaactaaagtaattccttgaacacaggacatctcattgggtgttgcattaggttcagcaactcagattgccatgtttgtggtaagatacacacacctctaatatgtaaatggacactttcataatttcatttataagttactttttttccccttcttttaatgaaagcttatgcaattacacaatataggtcccattatgtgtaatcgttgcttggataatgggtatcaatatggacatgaacttcaacctcttagagacaggttcccttgctttggcaattatagtcacaggcttcactttacaggtatatatttaattaacaattttaactggaaaaaaaaaaaacccatatttttttacctcattttcattcaatctctgaataatggaatattatgagaattgacaaaaccacccttaattattcataggatggaacttctcactacatgaaaggccttgttctcctgctgtgctacattgttattggggcatgcttcttcgtacaaagaacaccctttaatagtaagtaaaatatgtcaaatttccaatggttacataaatataatagtcaaaatccgtgatgccattcttataaatttgtaattcatgcctaatatttgatctcttgtttttcacagaccaagctgatgttactaacatcacacttaaaccagccactaatgcagttttaagcgcttaattagtaggtaagttacaagttatgtgtcacataaatataaatataatccttcttgtgaaatcacataaaatttgatataaagttaaattaatgtgggaagttggtttgcaggctttggcctatttgttgtccttttctgagatgaagaatggtggcatcgatccaaacccaaaatcagattcaaattcaatggattggttattgtttcattctgatcacattgtcatatccataaagaagggggaaaaaaaaagttagcactttgcagaagcattgcaattattttaagttgcaatagctagctgttagaaatgaaccactactgtgaaagatgttgaatcatacgtacgtgtgttctatcagagaagctgcttttgatcttgtgttactacggtagatgccaaatgagtggaagttgttcttgtttgagtttgctttagtaagaatccctttttcagtttgcagaatctcttgtatttattgtgttactatatattgtactaggtctggtgggaaataaaaattttataaattttaattttatagaacagagtgcaaatattattattgatataaattaaaatgaagagagaagttttacgcataaactaaccaccctccagccaaggttctatagcaaatatataaatgtatgtgcaagtttgttctcgtttaaaaaattctctagaaaaattgtccatcaaaaataattatttttcttaaaaaaaagtttcttatataaactaatagctgcaaattaatcaaagatttttaggaaatcctcatacattcgggggagcactggagcaagttgtgaatttttcctttacccattctatttgcacctcctctaattctcaattatcatttctaatgaactttgactagggatgttgaccggtccaatctctttaaggtttgacccatcaaacctgtgtgtcaaaagaacagaacaaatcagtccaccgaataaatgggcttcttttaagttcacattgtgtctttcaaatccgcagataaaaggatcggttcgaaccagtttgcaagtctaaaaaaataatttgaaaaaaaaaatattttttaaaaataaaaaatgtttaaaattagaagaattttttctcctaatttttaagttaaaatctatcatactaaaatatactaatatttataataatattaaagactaaatattaaagtagtgagacaaaaatataccaacatttattatatagtcgatctttactaaaagcatcaaaatgtcttaataataattagacgggtttcaaggatagtccgcagataactagatccacggattttgcaagcctagctaactcaaaaactcaatatgcaactatgtcaactttaaaaaaagagacctattgccaccaccccactcctcgtttttcgtttggtgcattgtgccactttttttcactgttcacaaataatcttcctgaaactagttttcaaaatgttgaattgcattttaaaaactagcttccataatgttatttctagacatttttaactaattcacttttt

SEQ ID NO: 259 - DNA, 6385 bp, Glycine max
  source 1..6385: mol_type = genomic DNA
tttttaataaattttaatcaataaaaataagtttaataattatatactgacaaaagataaaataattttgttgtatcatttaattataatttatcttagtaaactaattattataaaagttaataaaattattattatatatgtatagggggtgggatgtaagatgatatatcctcaaaatgtgttagagaacgtgctaaatattttatttttttttaagtttcccagcatttctcgatccatatttaaaacctaaagtcatccagataaactcaagtcggatcacgccgggcatgttatgcttacccctaattataacaaatttaagtcaaatttgaatttactctgaattgttatcaatgttaaaatcttacactactaatacataaaaattagtattttgttatttactgaatgtattttacacaatggtcaaaacgttgttttttttgttttgaatgcggtcaaaacggtttttaaagcatcaaaatacatgccattgtcaggtacgaaggttttttttttttttttcctttctatcgagggagggataataagaatataaaatctcgttaaataacgaataaaataaatgataagaattatgttaattgtcattttatacgcataattattgagcacaccgttatcttctagctgtaacatgctaaactcgagaacaaaagaaaaaaaaaatgaagtatatttagctgttgtctattcatttgttagccgttgtaattttttcacgtgtcattgtaatttttttatgaaaaaaaacgcccatgaaagaaggcacaagccactgtggccaattaatagctgttaccattttaatacactgagttttcaactttgaatggtcaaaagctaagggacaagaaaaccaggttacacttgctagatttttctatttttatttatttattttccgaaaatacagaattattgaagaaaataaataaatagttagaatgggttggttttcttctttgactgtcaccagcgcattatagcacaccacacaaaaaagcaaagcagaaaacaactgttacttacacacgccatgggtatgggtatgggtatgggtatgggtatgtatgccattatcatcatcgatctaactctaactctctctttctcttccttctaaccgccgcttccgcatctcgcttccttctcttccttctctaactatatatattttctttttctctctgtttcttcctttttattttatgcttttttctccgatgtgactggcgtttgtttggtgtgtttttcgtgtgcgtcgaaccctctgcgttcgttaattttgttttgtgttttcggatcgacttgtttcgcgttcggttgcggggatcttcggtttaggtttgtttagggattttttgttttttgttttttttttctgttgttcatgagtttttcgttggatttgttgtgttctgtgagattgatgggctttttttttaaaatttatattccttcaatgttttttcttttttggcaaaatgaatatttatttatgggcggaatgtatttgcgatttttgtctcttaaattcatgttcgaacggtggtgtgactttcctgtttggttctgtttttatgaagcctgttgactgcaattttgcttctgaaaaattaaaaaggaaatatgttactgtcatttttctacgcatatctaatatatcttctttttgttttttatttatttattttaattatggtggaattgttcattctggcaggtaaatgagtggtaaatgagtggtttttgagcagaagcagttaaaagagaaagggattcagcgaagatgacatcggttggtgtggcaccaacttcgggtttgagagaagccagtgggcatggagcagcaggtgttgatagattgccagaggagatgaacgatatgaaaattagggatgatagagtatgtaatttgtaaccccgctctttgatattttcgtttttttcatgttagttttattttctctatgtccatgttgttggttacttacagtttgcttcattttgtaggaaatggaagccacagttgttgatggcaatggaacggagacaggacatatcattgtgactaccattgggggtagaaatggtcagcccaagcaggtataccttcccccccttttttcctttatcaatcatatacacactcatttatgccgtttgaaatgattaactcttgcactgtctcactttctgtgcttaccttggaaggctgtaaacaatcaatgctacagcttcatattgttatttgtgtgcaaatgttttcccccactccctatagctgctgtgattttgaatattgacgtttgaattgacaatgattatcattgtccttgaagtcaataacagaaaaagaaaatcctcaatttggttatgatatcagctcgctgcttgctgactagaatctttttacgatgacgcgcataacttcttgcagtgtgcaatgtgtttttgtcatttcttgtgattggcaattctcctcaccgattttttactgattgatgaacttgtgatattattggatagggtgagaatgtcgtgatgtggtttttgtcgtatcatcactgtgatgaatctttttacggtgactcacataacctcttgctgtgtgcaacttggtttgtcgtgtcttgtgattggcaattatcctctccgattggtttctgattgatgaatcttgtgatattattagatagggtgataatgtcgcaatgtggtttttgtcatattcttgttaaccgtctattttagttcttgtgggttttttttttattctatatgtttattgttttaaaataatcttatactttatgttaatattttagactataagctacatggcagagcgtgttgtagggcatggatcatttggagttgtcttccaggtaaaatttccagttgactaaaagagatgcatttctttagccttttcaacacaagtgacataattattgccttagttctgacattgggtgtgattgtaggctaagtgcttggaaactggtgaaactgtggctatcaaaaaggttcttcaagacaagaggtacaagaaccgggagctgcaaacaatgcgccttcttgaccacccaaatgtcgttgctttgaagcactgtttcttttcaaccactgaaaaggatgaactataccttaatttggttctcgagtatgttcctgaaacagttaatcgggtgataaaacattacaacaagttgaaccaaaggatgccactgatatatgtgaaactctatacataccaggtatgactgttgcccttcctgtctccagctctcatcgttgttcaggctgtaacaatattttttttatgttgcagatctttagggcattatcttatattcatcgttgtattggagtctgccatcgggatatcaagcctcaaaatctattggtatggactttgttttaatttgcataaatcattgataatttattctgattctcttgtttcatagttatggttgtgtttaggggagctaaaagatgggaagcaactaattcaaactctgcagacagggctgttgggtggaaaatactaactgaatgtttttctgtgcaggtcaatccacacactcaccaggttaaattatgtgactttggaagtgcaaaggttttggtacgttatatatgtctgcatttcagccccttcctccttaaattattcctcttcattcaacctttctgttttccttggttagattgtagttttacttttccttatttggtcttgacctttgacaggtaaaaggtgaaccaaatatatcatacatatgttctagatactatagagcacctgagctcatatttggcgcaactgaatatactacagccattgacgtctggtctgttggatgtgttttagctgagctgcttcttggacaggttggtggctgttgatgtgatctcttttttttttttttttttggtttggcttacttaattaaaatttgtattttctttttacagcctttgttccctggtgagagtggagttgatcaacttgttgagattatcaaggtaatctttgtgatttctaactttctttattgttgttatatcttatttgcaagtgttttgaactgttgatctcatattttgctttagccttttaatattgaattggcctatttgatgacttgatcaattatataggttgccttgcttacttatgcagtgccagtattataacatgtaaatgatcatttgttgtgtgttaataggttctgggcactccaacaagggaagagattaagtgcatgaaccctaattatacagaatttaaattcccacagattaaagcacatccatggcacaaggtatcacaaataaatttaatagcatttcatgctttcttcttaagctcatcatattaacgcatttaaaaatccttattgaacacactatactaaaatatattcactgattttcttctctactagatcttccataagcgcatgcctccagaggctgttgatttggtatcaagactactacaatactcccctaacttgcggtgcacagctgtgagtatcggacttcttatcaaacttttagtatcccaccttaggaaaaaagataataatagtgcttccttggttttgcaagtttgtgtttcagtgtttggcaattttatgttttctaatctaattattcaatgtttgtgtctcaacatctgattatgtattgagtattttgtgatttttgctttgtgtggtgtagttagatgccttgacgcatcctttctttgacgaacttcgtgatccaaattctcgcttgccaaatggccgattccttccaccactatttaatttcaaatcccatggtatgttgattttggaataggctattgtgtttatgtgactttggtctttctttgttttcattaagaaattattggctgactttttgtatgttattggtgcttgtaccagaactgaaaggtgtcccagctgagattttggtgaaattggttccagagcatgcaaggaagcaatgcccgtttcttggcttgtgaagtgtaacagaactgcaagtgttgtttccatatgagaatgccgcgctttccttctatttaaaatgatatttgttggtatctttattgtattcggttgccctgtaaaatcagatttagagatacatgctactcattatcatcctaccccccgatgggtatgtagtagaataccctgtttcctgtatcacagcagattgtaacatacaatagaagacaaaatgtctgcaattatctgaatgttgcatcaatatttgtatttgttgagacactgatgggttgttatttaatttagttatgcttagcgtggtggttggaagttgtaatggccttgtctgtgcatttgtttattttccactctttaggtaaagctctgaccaaacgacttgggacgaagtcttggtgcttgtcttgtatatattgctcgattgatcgtgatcgatgttaatttaatcaaacagttaggatgacttacccttttttagtttcagtattattttcaatttgaggctgaggtgcttgagtggacttgtgcgaacacttaaaaaataatctttgatgggtaagaatgactcttgcctacggtacaaagaatatatacaagcgcgttcgaataaaatgacaaatttcttgggcatattttttctccccttttctttacggtaagaaaatcttcgtcaatggagactaaatccatgaggcattttcaagttgagagctattccttaactactttgaattccaatattcaaggttgagagcttaattctttaactactttgattaaggggtctaaggtcaatttggtggtttctgtcgttggattcttagcatgaggatgactattgacccttcatcaccactatctctttacattgaacaaattacagtaattcacgctccctgtattttatgcaaattatataaggtatccctacttttttttttctctttctaagtcacatgaatatcttattggaaacaattttattcgaattggatagaatcattatagacgataaattttttcactcaaggtattgttaagtataaaagcatttatttgacacttctcctacaacatcattaagttaatgatatatttcaagatataatattatcaatcattaagaattattattattaatataaatataaggatctattttttttggtgataatataaggatctatttacttgtgtttttttttctttctaatttcactgtttatttatgaaattgacaattttataatttaaaaaaaaaacacacacacacacaagtgtaaatcactaagatatctctgatatatatagtttctgtg

SEQ ID NO: 260 - DNA, 3765 bp, Glycine max
  source 1..3765: mol_type = genomic DNA
gcaagttggaacagaacagacaaaataactacaaactagcgtttgataacgaccacaggacagaaaacaaaactagcatgtgcctgtcactttcccaacggtcgccaaacggccatttctttcttaatcctgtgcctctcattttcctaccgttaacatgatatgaccttaggagagaaagttgaattgaaccaaaagtattcactcgctctgcatataacgggtgttttttttgtcaccacaaatcattaattatattttaaaaaacttgattataatatttttctaacataatcattactcaataatgtccaaatctagtctggttcttatttttttttactgaatggggattcctttttatacaattttagatactcatcaccaaattaatgtataagtaaatacttgacaatttatcttaaatatcatatatatatatatatatatatatatatatatatatatatatatatatatatatatatgcttggtaataccgcatccgaatcctcatatgataatttacgcatacgtagtcacaaacttattcacgcattacacatacgtggttgtttagcagaacacttctctgcaataactcatcttagttgtgtatgatgtactggtttttgaaagtagtagaaaaaattaaactatgcatttaaattaatactagtatcaattatatatttacacgtcctttttattgaaaagtgtaaaaaatagttttataaatacaaaacattaaaaagacaaaaatattagagacatccagaagtctgcggcggataacaacgagacaaaggaaccagccacagcaagtacctgctcacatccttccacagaaattacacatatctttatcttatttaacagctaaactaagcccacatcttattaatatcttaatctataataaaaatgaaaccataatagtacaatagctctttgctaaaaacaaaaaaacagtcacatttaacctttttcattggtttataataattattacccatggatggactttgaactacactacatattctctgaccaccctagctagctaattagatttctgagagaaaggaaagggtgtgagaagagaatggagagtaaagaggaagatgttaacgttggagcaaacaagttctcagaaaggcaaccaattggtacagcagctcagggtggtggtgacaaggactacaaggaggcacccccagctcctttgtttgaacctggtgagctcaaatcatggtccttctacagagctggaattgctgagtttgtggcaactttcttgttcctctacattaccatcttaactgtcatgggtgtcaacaggtcaccctccaagtgtgcctctgttggcattcaaggcattgcttgggcctttggtggcatgatctttgcccttgtctactgcactgctggaatttcaggtatacatattttttaccatattatggctcgatgtctgatctgaaacacatttttttttttgtttaaaggttttgaactaagccagatctgtgtttgtttgttgttgttgttgcagggggacacatcaacccagctgtgacctttggtctgtttttggcaaggaagctgtccctaacaagggcactgttctacattatcatgcagtgtcttggagccatctgcggggctggtgtggtgaagggctttgagggcaatgctaactatgagttgttcaaaggaggagccaattttgtgaattctggatacaccaaaggtgatggacttggagctgagattgttggcacttttgttcttgtctacaccgttttctctgccactgatgccaagagaaacgctagagactctcacgttcctgtatgtattctttcccactacaatattgcttattcattccactaatttggtttataaatggctatattctgactttgtaattaatgtggttaatgtatgatgctatgatataataattgtagattttggctccacttcccattggatttgctgtgttcttggtccacttggctaccattcccatcacaggaactggcattaacccagctaggagtctcggagctgccatcatctacaacagagaccatgcatgggatgaccaagtatgtttttttgagacttgaatttttgtttcatatattcccattagcataggaaataatgtaaatagttttattgaattttattataattatcttaccgagtcctcacttttgattaatttttttatcagcaaatattaattttataaaaaatattaatagataaattcaaatttgtaatcttttctttctttaccctttcccaagtaccggatgaaccttatatctccggattttgattcgttaacaatataaaacatttttactaatttgtgcattctcgttattttaaaccccacagaagatatatatatgctttaataataatgtaattttttattttatggtttacagtggattttctgggttggacctttcattggagctgcccttgctgctgtgtatcaccagatagtcatccgagccattcctttcaagacaagggcttaggctcttgtttttgtatgtgcttgcttgtattagttgttatttatgtgtctggtgtcttcttcattttgaaaattcatgtcaatctttttgcctttgtgttaatccattgtatggatgtaaattatgacatgattacttccttgattgtatttgtggcactctgaatggatttcttcttttattttattttttttataatggatttcttcttttaaggcggcttcaatagaaagaaaattatataatttcgattattcataaacactcgcactattaaaatccatggggagtttcctcaatgcctgaaactttgcaattaatcttaaaattcgaaggtttagttacttatttgatggataatcttttacctttcacagtccctgtaattagaaactactttttagatgatatgattcacatgaactaaaacaaaattttagaatatacgtgtaaagactaaaattagtaattttcatgggtaatgactaaaacgtaatattcttctttaaagtatatgtagttttagtacaaattaaacttgagaagtatttaatagtttgttgtgggatgatctaatgtgctctttatgatgaaaaagagcatcataaaactagtgaaattaatcaaagaacaatcttttaaatttgtgtaattcctctttatttttaaatgcttcgaatactaatatcttcttaaaaaataacagaaatcatgtagctaaaagaaaaactgaaatataaaaggaacaaattactaataagaaatagcaaaatcattgagaatttatggatgtacactataccgtgtaagaaattctgcaagtgtctaccattgttagagtaatatttattattctacatggtgtgtcattagattagacagaataagtgagatttgtgtcaattgattaaacaaatatgaaaaatgaatccttgtttaaacaacccctacaacaataatactgttcattccaagtcacaacaagtccacattttcttgcgatgagtatattggaccttgatttacataacatataatttgcgtaatgatttgtcatgttagtcatgtataactcattgaggaacaactttttctatcaatgtgcacatagcgatgtgtaaattggaccttgatttacataatatataatttgcgtaatgatttgtcatgttagtcatgtacaactctaattgaggaa

SEQ ID NO: 261 - DNA, 3778 bp, Glycine max
  source 1..3778: mol_type = genomic DNA
tacttttgaaatagaagtacatgattttgctaaaggatcgaaattcttattttttgtttttattttacttttgaatgttggatgtatatatttcaacgcttaagaattattcatggatttatttatgttgaagttggttcaatcgaatgtcaatcttatatgtaagaattctttggctgtatacttgtaatatctttttcttctgtcttttttttttgtttatcatttctatgactatcacctttcttccttttcatcatattagtatttattatatcttgtcattttagtttttatccatctccctcccttgcaccaaattcacaatatgccatggagatggtaaagaaacactagtcagaaaaaaacaagtataaaggggttgggaggggggagggtccaaatgtcaatttgcaaaatatggcaacatggctttgctctgcactgcaccttcttcctcttgtgctcgattttaattgggtgtgcccgggatgattgtcagagatcagaacccttcctctgcatacacgcacaatacaaacacacacgtagaaagagagtcacgggtttgtcttgaaaagccccttatttcagtcctagacacacagacagacagacacttattctctctcaccgcataaccaagcaccctaaacaattcaacaaacacatttatttgtagccaaacactaaggaccctctttataaaacttcaaatattttattgaaatatgaaaaattatattatttataatttttttttatttttctatttttttacgataaatattttttttaaaatatcttaagaagaccattaacaaaattttatttttatataacatcaacaaaggaaaacaatttccttcccctctccagaaacaacatccacaatttatttaaaataagaaaaagacagagccaaaccacattagattgtacccgcattaatttctctctcgcctcctttatctagcttgcaccattcccatgctttcactcacaccgtctctttctctctgatcttttcattctgtctcttctcttttcttttcctctcttctctctttacttccctcaatagcaaaagctatggctcttctactagacaactgtgaaagcattttgctgtctttggacacacacaaatcagttcctgcacctttccttaccaaaacataccaacttgtagacgacccttccaccgaccacatagtctcttggggcgaagacgacaccaccttcgtcgtttggagaccccccgagttcgctagggaccttctccccaactatttcaaacacaacaacttctccagcttcgttcgccaactcaacacctatgtatgtatcacacacccatcatatctctcttctttttttcttttttttttttaagttcttttatcgaaggcaatcatgtttgaaacattatcaatcaatatatatgagagacaaactttgaaacattatcaaacaatatatatgagagacaaaacttagaaactttaattccgattttaaaaaacgaaacagaaagcatttaaggaattaatatctttagttttttttttttatccaagtattggtagcgcatctccaactcctagtaagaattcaaactagtccttatgctagacctaattcccattttaatctcactttcaagatgttacatttttgcatgctccaaattgtgatttaccatgttgtggtaattagtccttcaagatgttacattttttgcatgctcccaattaactaacttggctttgaattttgtttgaatagggttttagaaagattgtgcctgatagatgggagttcgcgaatgagttcttcaagaaaggagagaagaacttgttgtgcgagattcacagaagaaaaacccatcaccagcatcatcaacaagtacaagccatgaacaaccatcaccaccatcataagtttggactcaacgtttcctctatctttcccttccacaataacagactcagtgtttccccttctcatgattcggacgaggtaataatacccaattggtgtgactcgcccccaagaggagttgccggtgtaaacaacaacaacagcagcagcaacaactacaacactgtcactgcactttctgaggacaacgaaagacttaggagaagcaacaacatgctcatgtcggagctcgcacacatgaagaagctttacaacgacatcatctacttcgttcagaaccatgtcaagcccgtggctcctagcaacaacaacaatttcccttcttttctactctgcagtgataatagtaatatcaacaacaacacatcaccacaaacacaaacacaagcacaagcctctcctatgagtaacgtttcaacggtgcaaaggcaactgaagcagtttgtagggtgctattccaacaacacaaagcaagcgcgtgctgtgaactctcccactaacagttccataaccattgttgaggaagaggctagcagtaacagttgcaagaccaagctttttggggtgtctcttcaatccaagaaaagggtgcaccctgagtacgggtctaacaatgttcttcaaagctccgaaacgaataaggcgcgtttggctttggaaaatgatgaactattaggcttgaatcttatgcccccttcaacttgttaattagttagttaagttagtcctcccaaaattcataaccttagaaccttgctattttctaattttaattgcttcatatatgtataaatatatatatttttcttctttaatcccttaatttgagttttgaagaaggcaaatgctgttgatggaagcttgtgttcgtgcgtgatcctgtgtacatttaacttggtgccgaggttatatccttcgtttttcctatccatatgtccgctatctataaatctattaattatagataataaaaatgaacaaataattcaaagaaaatatccgggaaattattgtataattgtgaatactatgtctctattgtcgataaattgataagtgtattaatttgtcctaaatagtaaagttaaaatcgaaattgagtgttgaatctacataaactttatttgtacttatgatgcaatcctaccccccaaggatattggatagaagacttcaattagattgggtcaaagatgcaagagaaggtcctagggttctcatgagccttaggataaatttctgagtccatgggccaaggttgggtccaattatctttgtacatattagattaggatgtcattatatttggtccttgtatttagcgttccatattgtaggtagggtatcctataaatataagaattttcagcccttgtattttagggcacctagactagtttttgtattaggggtagttttgtaatttcacatacactaagtggatatttgatatgtgtggttggaaataaatttaattgaattggtagaagcccaatccaattaaattttagtgggggaggtgagcacccctttttcgtaaataaattaaaaaatattttttatttaaaaataaataaagttttagaaaaatgatgagatttttataattaaataaataaggagaaataaatttattaattaaaataatggtttgataagaaataaaatagagttcccttttataaaataaataaataaatgaaaatatgagtaaataaaaggtcaagagtatcctacctataaatagagatgtaatatgttaatttttacatttatgacacgtctatgtgctctctcttcctctcaaattcgttttcccttcttcctttcctaa

SEQ ID NO: 262 - DNA, 3778 bp, Glycine max; identical to SEQ ID NO: 261
  source 1..3778: mol_type = genomic DNA

SEQ ID NO: 263 - DNA, 12577 bp, Glycine max
  source 1..12577: mol_type = genomic DNA
acattatggcggaagttgatccatgtagccgaccccacctagtgggataaggcgttgttgttgtttgttgttgtatcttaaaattatgttttattacctacatgtaactcaatattagtttcaaattcatattttatttaatgtattttttttttctgtcaatacttaaacattattattatccaaataaacaaaattatataagtgtgtacatatagtaataatttatatttatgaaatatctccttttgattctctatggtcattcaaattaataggaacgatgactcaaactaagaggagatattttaaatttttattgaagagttagatattttaattatgttagttaaaaaataagattaatgttaacataagattaatgtttaaaacgaaaaataaataaataattaataaatataatttaatgctaatcatcatcaaaataaatcaattttgtcaatgtcaatcaacatttattatttttttatcttttgcgtttaatttgtttcaatttccctttaatgaatgtttcttggactattaacaagtctaaggtacagattttgacacatgtttcaaatttatattttatttaatgtatttttttctgccaatacttaaatattattattatccaaataaactaaatttttaatcatttcataatgaattttaacactattgataaaaaaaagttaatgtttataccaaaaatgagtatgtctcattttgattctccatggtgaatcaaactaattcgaacgactttatttgcaatatcattaacaagtctacggaccttgacccatgtttcaaattcatattttatttaatgtatttttttctgtcaatacttaaacattattattatccaaattaacaaaattatataagtgtatacatgtaataatttatatgtatgaaatttcaaatattagtatgcacgaacgtctctctagttaagaaaaaaaacttattcccctccatggctgcaccaacctcttccaaattcacattgattgttatcttggtcaatatttttttttctcaattttcagtaaggaagtaatagaatagaatattgacattgacaaaggtatggtcgtagacgtgagcgcatggaaacccaacccggacgtgttgccgtagaaaaaccggattggatagtcggcgataggtccgaattttgtaagtggagagagagagatttgttctggcattgttttgagtctcctcgatcggtcaaaagaacacgcaaagcaaacccaacccagccacccccaacacaacacaaaccgtgtgctaacaatagtatagtgggtgtgaacccccaaaccctaatccttcgtttctatggtaataattcattctcttccatcgatcaatcaccgttccattttcatttcgctcagttccatagttcgctttttttttttttaatttgatttaatcagaccgagtgctgttggtgtcagcatgcgctagcttcgtcgtcgtcgtcatcgattttccggtttgtgattctcgtgattcttctcgggccgaattattgggtttgacggcatggatttggtaccgagcgtcaaggtatccttgatttttcagtttagggtctctaacgcacacacgcacgttctgaattgacttatagatgaacaattaaacactttgcttccgctagggattcatttgcatgtattgctaattcgtaaaaaaaaaaaacgcttatgattgatttatttggtgaccagaagtacacgaggtttagatttatatatatatatatatatatatatatatattggaagagcaagcaaattgtgtatttttttttaaaattggatttgcacggaaatgtgaaggagcttttttactgcaaaacatgtatgtgccttgttgatttgattggttggactttaatttttttttctttcttttctttatattcttggttatgtatcctgtaactggtttaatttttctgtgatcttttttttttttgttaacgatattattggatactttgtggacaatgtgattccgtggttggatactttttagttattcaatttttgatcctgctctactttttagctagctaaacttgaattccattcgcattacttcttcaaacgatggtatttttgttttcttcttttgcttttattctagtattggattttgtgtactgttgtattaatcattggggtatgctatttattttcctgatttattgacatctctttgtaggaaaagttgaactattttcgtataaaagagctcaaagatgtgctcactcagttacacctttcaaagcagggaaagaagcaggtgagataataaaactattacctactccgcctttgttattgtgaggctttttctatgatgaaaccttgaacgctagtactgactgacaccctgttgaatatcatttattctctgattactgtttcttgttgataacaagttcttctgtttataattttcttttcttttgcattttctaaacgtgttacatgcaatatatggatcgttgtatggatagacatcatacttaatggttaataatatgagttcacaactcttaaaatagatggatattgtcaatttatgacatgaagtttcatcttattgttgtagtatctttggtttggactccatatatcgtttcctttttaatctaaatttaatatgctgtctttgagtttttggatgatatagtgatgttgtgtttcgtcttttgtaggatcttgttgatcgcatattatccgttctctcagatgaacaaggtaaagttatgcacacatgcagaagcacaggactcaacctttgggtctaattctatcttatacatctggtttattttcactatgtttctgtttgagttgtgattatgcctatacattggaataaatatggttcacttttacattgtagtgtgtccaattacaggttactcacatgcctctcaatctctctccttcctccttttttcctgttaactaagcaacttgttgctcttttcccagtttcaaaaatgtgggctaagaagaatgctggtggaaaagaacaggtggcaaaattagtggatgatacatataggtcagtcttagcaacaacactcttgataatattttcttctagcttttgtatgcttcagatgcataccgtgacgtaacatacttggcttgagttcacataaatgatctggtaccttactattaggtctggtttacctcaattatagtgcttcatatatgatgtaatttcttgtctttgactttgttaccgtttattcacattcttgtattttcttttacttaggaaaatgcagatatcaggggccactgatctagcttctaagggacagggtgcatcagatagcagtagtgtaaaggttaaaagtgaatttgatgatgcttttcaacgagatgtaaagattcgctgtctatgtggaagtagattggaaacagaggatttggtcaaggtgtaccattaaatatggtttcttatttctttatgataaagagaaacactatacatcagtacatgcagatactatttattcagtcaatttattatctcatccacttttttggtggtcagatccacttttcatttatgtttcttactatataattttttaattttaattttcctcatcatattgcagtgtgatgatccaagatgccatgtgtggcaacacatcagttgtgttattattcccgagaaacctaccgaaggcatcccaccagttcctgataaattttattgtgaactctgtcgtctcactcgtgcagacccgtatgttgaattccctgcttactttagctaatagctatatgtggagtgggcgataatgatttgtctacagggttttccttatgatgaatttttaatttttgaatttcatgttaaagggttttagcatggcattttttcttctagggttgcatggttaacattatttgattatgattgcaatttctcagctacaatactctgttggtatggtgaactgggcttttgtagttgtgagcatggttatcaaacttgctagttgactcgtagaattgaacgagtttacaagtgcacaaccaccaaccgggtgaactcgctagcaaactggtttttgggtggactcacataaactcgtgcagacttgggtagaattgctcaaactcacgagtttgtgggtgagtcggcaagttcagtggtggagcaaaaattgctaaatcgacagtcgttttgggcttctgttttgcgatttccctcatcctccttctttcttttctcaatttcttttttctcttctccctcacaatttttgtctggttcagtcttccccatgccgattgaactcggttcagatgaagctctgttcaagtgactgctgctttgactctgcttgctctgttcaagtgactgctgctttgactctgcttgctctgtgagaagattacctgattgaaagaatagagccctattttaaaatggcatcgtattggttttttttttaagaacttgtcttagagcaaattatagcaacatcccgtgaggtttcgtgtaattacacaagcactcactaattttttaaccattactttcacctcccttgtaggaggtgttggtgtaagtttggagggcatattgaggggttgtcagtgtaatgttttcaaacatatagggggtgttagtgtaatattttcaaacttgaatggaggttaatgtaggaaaatcaaaaaagggtagggttatgtgtaatttgataaaagctcaagaggtgttgctgtaatttgctctttgtcttagctgaaagttggaactctcggtttgtttttgaatacatggtgccagctattgttggaacttttttaatacttttgaaagttagaagttgtcatttgtttatttttatttagcataacatataatgtataatatgttattaatagtaaatgataataatagtaatattaatgatataaaaaaccatttaaaacataatatataatataatcaactaaataataatataatggtattataaaatataaaaaactgtttataataaactaaataataataacctaaataaaacaggtatttatatgtatttattattatattattttaagtagactagactcttaggagttatgagtttaccgagctatcacaagtttacgtacactctcgagtttgataaccttgattgtgagatgatacaaaagtgcaatattgtaaaaaaagtttcagtctgatgattactttatggcccaataatggttctggagtttgtgaatttgttcatgcttattcagtcattcttctatggtaacattgttatatcttagtgtgttcaggttagttgtgaaaaaaaatatttcaataagttataaacttctagttgattatagatataagttatttttggtatattagttataaggtgattttaagataatttattttgttttgaatgtctaataaaaaaccatttaattttatattaaatcgcgaaagggctataagttaatttctagtagttagttttatattttaaaaaataatcaattgtcgaggataaaatgggaaaacaaaagttagctaaaaaaataatctgatagcttttgatcacgaggtctaaagttttgcttacgattgaaagctttttcctttagaaaaaggttttttattactgataaatttgttgatcattctagcttaaaaagcttccccccccccccacaaacaataatcatattcaaacatgtacctagtcttttagttatgcctagagataatcattatgattagtttctgactcacaaagatgcttgagttatatgttttctttcactttaattcttttgttctgttttattgaatggatcttgcctcattttgtctgttatattctttcataattgacattgttagtctatactttttattatttagtatttttcatatttttgccactcaactttgtagcttctgctgttctctgttacagattttgggtttcagtggcacaccctttgcatcctgtgaagttgaccacaaccagtaatccaactgatgggtgagtacatggtgtggggttgttgaaattaatttggtgtaattgggtttatttctttattaactgaattccttgttaatactgggattttaaatatactgtttgttacctaatttgcatataagagactaagatgtccttcattctgcctttttttgttctgttttggggggaaggggtgggtgggggtgaggggggtgttgcagtggggaaattgtctaattctttttgagcacgagtgcaagttccttgccttggtgataagcttttaaattgtttttttcgagttatgttgatgcagtgtactgtatgttttgttaattaaaattctctaggtattgagtttgattttttgtgatggaatttactcaggtaaataacctgttaagaactgtagattttctccttttcttctctctctgtttccttaaatctttattaggtgcagtttggctagtaaacttcattttatttccaagccacaaccctgtgcaaataattatctgcattgatgtttaaaaccaaattttcaatgtggctttcttcctgaatggcttatgttaaccgtattcctttttgaatttttcagaaacaacccagtgcagagtgtggagagaacatttcaactgactagagctgacatggacttagtatcaaaaccagaatttgatgttgaggttggtttggattttctgtgcatgtataataatgcatatccttctatgcattggttttcttactaaaaaaatgacttgtaggcttggtgtatgctcctgaacgacaaggttccattcaggatgcaatggccacagtatacagacctgcaggtcaatggtatgttttgagtcatgctctccttactaatttggaactagatttcatgttggaagtctagtttatttttcatggtatgttatgggactagaagcacatcattttaaagtaaaacaccaaatatatgtttgtgatgaaatctattttccttgatttgaccattatgattatataggtgttcctgttcgtgcaactaacagacctggttcacagttgcttggggctaatggtcgggatgacggtccaattgtaagtttgttgtcatatacagttatgaattgtgcaactatttaaaattgagacaagttcatttactatttgtatttgttttattcaatttcttattgtatttctcttttgtcagatcacgccatatacaaaagacggaattaataagatttccttaacaggatgcgatgctcgcattttttgtttaggggttcgtattgttaaaaggcgcagcatgcagcaggtagattgcactcttagcttgataaatttataagcaaactatttttagttactgttggttccttaatccatccttgtgatattgaaataatcaagtttaaagtatttccctgtatgatgttgggccaaagttcttgatattggttcctttttattgatttcttttgaaacttgacaaatcatgacatgcttttgcaattatctttattgtcaattttgaataacacctaaccacactcaaccttggaagatgtttcttcttccactataaattggaaagcttgtgtatgggcctcaaaaagtgttgcttctattctaaagtaagttaaaatattttgattttttttcttatagtttcttgagcattgtttcggttcaagttgtctggcttatgagacttttttgaataaaagaatgccaatttttttcacataatgataactagatctggtttgggttttgaccaagttttctggttttaattggttgtgacttgcttttggttcaactcttctctgttgtttgttattgagacagaccggaagcctggttgtcaattgtaccatcctatcagtctgtttttagatgttggtgttgaattttatgtttctactttgttgtgaatatgcttaacatacaactgcttcccttccgctactcttataaacttgttaaatagttgagtctttgttatctagatcctaaactcaatcccaaaggagtctgatggagagaaatttgaagaagctcttgcacgtgtctgccgttgtgttgggggaggaaatgcagctgatgatgctgatagtgacagtgatttggaagtggtttcagatactttcactatcaaccttcgatgtcctgtatggctttcatcaatagatgaattattttagcaattcatgaagtcctcctaatcagtttttttttttttggtgaaaattttagatgagtggttcaagaatgaagattgctggaagatttaaaccctgtattcacatgggttgctttgatcttgaagtttttgtggaaatgaatcagcgatcaagaaaggttaggttctaacaaatgttatgttgcatgatttaaaccccaatgtagtgattttaagtctgatgaattgaattgtttctacagtggcaatgtcctatatgtctcaaaaactatgctttggagaatatcatcattgacccttatttcaatcgcatcacttctatggtagttacttaaaaatttaataatttcttgtgttcataaatcttccattcgacaaaattctgtagttatttaaattactttggtggtatagatgatgaactgtggcgaagaaattgcagagattgaggtgaagcctgatggttcttggcgtgttaaggtaaagagtgaaagtgaacgcctggaattaggaaatctagcacagtggcgccttcctgatggaaccctttgtgtttcaactgatggagatgttaagagagtggatacattgaagcaggttaaacaggaaggtgtttcagacagtcctgctggtttaaaacttggcataaagaagaattgcaatggagtttgggaagtcagtaaacctgagggcacaaacacctcttctggtaataatttgaaaagggtttttggaaatcccgaacaggttgttattccaatgagcagcagtgccactggaagtggtcgggatggtgacgatcctagtgtaaatcagggtggtggtgggcatattgactattccactacaaatgggattgagatggattctttgtgtctcaataatgttgatttagcatatgaatatactgcacccaacacttctgcccaggtgggtggtgcagaagttattgttcttagtgattctgaagaagacaatgatctgttggcatctcctgcaattgcatataagaacaacagaaatgatgctacagatggttactctgtaccaccacctgtaattgttgattcatatactgaagatcataatcttggtggaaattcatgcttgggactctttcctaatgatgatgattttgggatgtcttccctatggccattgccttctggaagtcaagctggtcctggcttccagttatttggttctgatgcagatgtgtctgacgcattggtccatctgcagcatgatcctatgaattgctcctcgtcactaaatggttatgcattggccccagatactgctttgggatctggcggtatcttgcaagagtcctctgctggtcgctcagttgctgatttgaatggtggtttggtggacaatccattggcatttggtggagatgatccctcatttcagatttttctccccacaagaccagcagattcatccatgcacaatgaattgagagatcaagcaaatgtggctaatggtgtctgcactgaggaggattggatatcccttagacttggaggtggtgctggtggtaacaatggtgatgctcccactcaaaatgggttgaattctagacatcaaatcccaaccagagaaggcgccaagaatactttggatgatactggtttgttgctatctgaccttactgaaatgttccttattttttagtggaagttactcttgttggaaactcctttttatttcatggcagtgtgcagttgagtgtgactataggtaggaaatggagctttttttcaatgagagaataataaaatatatttaatgaagcaaaattgaccatatcctttaaattagtaaaagtaaaagaaaaaattagcagatttttttataaaataaaagtgtgtccttgttatatatgtaatacatcataatatattttagtttagatagatgtaatttataataaaaaattataaaataatttgataaaatatatgctctgcaaaatagaacatcttggccttaataattgagttttgtgacaagaatatttattatgcatccttttaacacttgaaaatgtatgcattcttgaaagcatgttagttttttttcttggacgcctgtctctgctatgtgtctctactgtagattttaattcttttgagagagtttttaattctttcatgcgtgatttttagtacatccctaagcttcatatcatgtttatttgagagggactatgaaagaggattggaagctgggtattcagtttctttgcatcgagcactgctattccttctgttaaatggttagaaaccttcaaatgtttagttgtggatttgttaagatacactatatggctgtgttaatctgctgatgcgtcatatccttgtgtcagaaaaagaatttttagaactctattcctaaaatcacccaaatgcccataatttgtttacttgcatagaaattagaaagtataaatggtttttttattacttgaaaatttggaggatgttaagttgaggaggttggtgttctctacatctatatgcattttgcaccttcttccattctcctcaccttcctcattgtgtttggccccctatcagataattgcattttgacctgagtcaatgatcattaatgctgttttgaagaaaaaaaaatccattaattttcttgattagttattcctctttatgcagcttctttactccttgggatgaatgatgttagatctgacagggcaagaaggcaaagatcagatagccctttctcctttcctcggcaaaagcgttcagtaaggccccgcttgtacctttctattgattcagattcagagtaaaggtcagaccttgtgtctcaagaactttaggtactcttaacatcagatttcgtatttagaaattgaagaaagttgagaggcatttttggtcctcatgaaatggcagttaatacataatgataatgtggtctgaggcatctctggtggaacagagctacaaattaccctgtgccaaaatgctttcacctaccccattggcaaagatgttggccctaatgattctttgctcttgatatctaaattgtccttgtgacagatgtttgctgggggtatagtgctggtttgttgtatagttaatcattcaaatctgtagttcaaactttcaaatttggtggtatattatttctgcatttttgtctctgctgagagcaataacctgtaaatgttttagccacatatcagatccaacagtgaaatcaaagatattgtttctggccatttttctagaatactatgttgtctcaagtatcatgcctcatgatcggccaagatagacgcccatttcataacacctggacgttgatatttatttaacatgtttaggcacctatgatgcctccccgtaaggatctatctatatttcttgcctggctaagtatttggtttcagatgagcttcttgtcattattctttgtttgcatagttgaatagagacaagagaaaagagcccctaaacgtaattgattagcctactattattgacaattattttaagctcgtttggctgatcaatataggttggtatctatattaaatttaatttttatgtaacttttttatattctctgtcctcaattacaaggttatttcaattaattcactcccttgagaaaaatagttggtttaattaattatattaaatttgttaactatttgtactagtattttaatattattttttcttatctttttatccacttaattatttttcatttaagtttggactaaaaataattaagagaatgtaggaaagaataattaatatatctagaaattaaaaaagtgatcttataaaaaagtgatcttataaaaaagtgatcttttaaaactataatttttttatttggtccccaaagaaaatattctagcggtctctatagtttattgctgacaaaatatcatcattttaaaattaaaactcacattttatttattaatataccaacttttagtttaattctttttataatttaagttttggtttatgtttcttattttttttataaaaaggaaacactttaagtctattattataaattcattacatgttgatgtaatagttaaaaaatatttaacatgaattgtttaatataatcattagaagaaaaactaacaatgagaagaataatattattcaataacatgtcattttaattttaattaaaaaagacaaataacaaataatttcaatctattaataaaaacaacataaaaaattactacataactattttcttaaaaaaat

SEQ ID NO: 264 - DNA, 6071 bp, Glycine max
  source 1..6071: mol_type = genomic DNA
aacatgtttttttaaatgtatttttattattgattaaaattaattaaaaattatttttttttgtagaatttatttttcatttaatgattttttcttttaattttataatttttaactaatgtgtgttaatagcaacgtgtaaaaaagtgtgatactaacaattatttaatatttcaaggaattcattccccaaaataccctcctccaccacccctaattactttcctattttgtcctccgcacatggtaaaacgtagtcataatcctaaaaagataaaaacgcttggaggtgctttgctcatcgaaatgattaacgattagaatttagaggctaacaataacaaaagctaattttgtgtaatttatctttcttgaggactcctcgcgctgtctatttccattactgggtaattaggcgccagaaacacgagggagaaagacaaccccgggatgcttttcgatttggttaacgtgggaaagttgtttaagaaagagatggttctttctttccctattttcccaactcgtatttaactctctgactccctctctaataaatagagaggaaaaaacagtaaaaaaagaaaaaaaattgaaagaaaggatcaaacacaaaaaaaatcacaaataaatagttaattaaaattatattagtcttaattttcttaaataaaattaaatttcatcttaaaattaatttattaatttacattgagtgaagttatctaataaatatataaattatattttaaggagtgaccctcatacgggatttgatatttctcaacaaataagatttcaacggtaagttttatgaattcaaaacacataattgaaaaaaatagaattttattaaaaatgattaattaatttctcagaaaagataaaacgataaatactgtgacatgataaaaaaacacaaaaataaaaattaaaacataaatagaaatatttgttttttcgagtgacgaatgacaaaaaaaaaggacaatttagagagagtggaaataatgagtcacattgaaaagtaaagagagaagcaagtggtgtgagagagagagagggggtgttaaggagagggtgagatgccttcgtctaagcttgctcaaactggcctcgtctatgctgtattgggcagttgtggaatacaaagatctttgaacatctcctttactacatttttgcaacacctacccctttctctctctctctttcactcatcctaggtttgatttttccttctctcaattcccaacctcgcatctcccattattttattctcaaaccacgacaacaaaagcacaaacttggtttctcaatttcttcctctcgatcctacccgagttaaattaaaaacaagaggagagaaaacaaaacagaacaaaataaaggtttggtcttttgaagtgggagtgaggaatcagacatctgggttggttgcttgctaggttcggttaatgttagaatgtgggatctcaacgactcacccgatcagaggattaacaaggacgaggaatccgaagaagggtgttcttccctcaataaaacttccttcgatggagatgatgacaacaacaacaacaaaggcaaaagggttggatctgtttccaattcaagctcttcagcagtagtcatcggagacgggtcagaagaagagtacgaggaggaagaagaagatgaagaaggtgttggtgttggtggtggaagaagtatgaagaaacgtagcagcaagattttcgggttctctgtgacccaaaatgaagaagagtccatggacagtgaccatccacctgtgactagacaattttttccggtggaagatgctgacgtggcggttgcaaccggtggtggtggaaccggtgtaagctcaacgttccctcgtgctcactgggtaggtgtgaaattttgccaatcagaaacacttggcaccggaaaatcatcagtggaagtttctcagcctatgaagaagagtcgccgaggaccgaggtcaaggagctctcagtatagaggagtcaccttctacagaagaacgggtcgctgggagtctcatatatggttagtaattaataatttccttccatttcatgaaaattgtgtttctttttccttctcgacaatcaaaatttgatttgttttttttttttttctggttctatttgtgttgcagggattgtggaaaacaagtgtatctaggtaagttcattgtcaactattatgattgtgtatgtgtgtgaaatgtgaaactgtggcagttatttttcctaaatattgttttaagcggctaaaacggttttttgtgtgtttttttgtcttggctgtgatgtggtggtagagacaaagagtgtgggtgggattttttttttttttttttgtggtgactgacttgatggtttttgtctgggtaaaatttgtctaggtggatttgacacagcacatgcggctgctcggtgagcccttgcccccctcctctagtattataccaagcttgtaatataactttttctatgtcttgaattgaacctaatctaattatcaaatattataaatcacatttcgttgtgggggaatgtgaggctcaaagaaaattgtgtattttccatctctctttgcagtgcatatgatagagcggctattaaattccgaggagtggaggcggacattaacttcaacattgaagattatgaagatgacttgaagcaggtgatcaatttgtgaatatttatattttgttttatcttatcttgaacagtcacacctcatacgtataggatcaccttatctcctacagttagtgctattttttctgtcttgaagtactctcatgattttgttaaatgcaatgttaatagatgagcaatcttaccaaggaagagttcgtgcacgtgcttcgccgacaaagcactggatttccgagagggagttccaagtatcgaggtgtcactttgcacaagtgtggaagatgggaggctcgaatgggccaatttttagggaaaaagtatgtgttattttcttatctttatttcttttttcttgaattttctatttgttgttgctattctaaatttttcttaattgtcatgactgagattaattcttatgattcattaggtacgtttatttgggtctcttcgacactgagatcgaagctgcaaggtaattaacatatcttgttttggtcacgttgttaattgtcatttctttttcaccttccaattactagattacccatctctatcaaagaatataaactattattattcatctttagggttttaattttggtccacacttttaccatagggcttatgacaaagctgccataaaatgcaacggcaaagaggcggtaacaaattttgatcccagcatctatgacaatgagctcaattccggtaagcgatgatggactacataaaactatatacttttttttctattaattcgtgtttatgttttattaattacatccacatatataatttatgtgtatatgtatacgtattagcagaatccacaggtaacgctccagatcacaatctggatttaagtttgggcaattcaacttcaaaccctggcaacgatcaagcgttggggaatcaagccccaaatgctgtaacccatgatcagcacatgccatctgagtctaattggcgtaatgggggaatcaagcctaaggttcttacttcatacactttataatataatttattattagtagtagtagtagtattttgtttgatggtttgttcattcctttttaagtttcctaatattcttcctttttatttcctgcttattaatttttccattcagctggtgaatatactcccaaaaccatgttacagaagcaacaacaaggacacacatggaagggatgtgcacggggagagtgaaacactgaggatgctaagtcaaacccaccttcattctccagccttcaatgaaatgcaacaaagatatggtccctacaggtctccgggaggagagtctcaaatgcttcaaaattttgcgcacattcacccaccaaattttcatgtgggtacctcctcaattaattttactttagctcacacattaaatagacataagaaaatatagaaacacgagccacccactattattaccatcattgaaacacattagcattagaattgtaagcacaattcttttttctcgttaaccaatgtcctttgagtatgggttaataaattaattgaaaaaattatttattatagaaatcataacatagagaaacagtataattttttatcttacaataaaaatattttcattttaaattttttaagaacacatgttagcatttttttataataaatatttatatttatatttatatttaatttgtaaatttgtaaatgtagtttcccagaagcagcattggaggccgaattgggagtgatctttcattatcagtggctgatcaacaacagtggcaaaccgggccttcacgttatttagcaactgctgcagcatcatcaagtttccaacaagagataagaccctcttctcaaggttggctgcagaaaaatgggctccacagtctcatgagaccctcatgatccctattataaatagagaattttctgcctcgccaagtactagttacattcaaataatcgtaatctgctccctaagtaatattattattgttacccttccagggtttcacccccaaaaaattattattttcttttcttagcatgtaaaataggatgcagtgttagattgtgtccatgtccaacccagacccctcgtcacacaaggccacaactttactattgaggtgaaaaagaaaaggataaaagaaaagaaaaaaaaaagaagagaaaatccaaattgggaacttactactggtctggggtcagtcaaactaacaaacggacgaaatctttaactagatattctgggctctgactaaaattttaggatcttatataactctgattttattgcttttctgcggttgtggtatatttatgacagcacctattcgtttcttgatttgggatgtattgctatcacatatacatggttgttgtcaatttgttccttatttctctttggtctttgaaaaaaacacttttccaaggaaagatgctagctttggttgcttagaagggaaataatgccgggttgtttatctttgacaaaaaaaaagttgagacaacaaatctagccaaagcctaaatgagaaaaaaaaatcaaagctataatgaatcggggaattttgttttttgtattttttatatggatatataggagtagggaatcagagatacaaaatgggtttattttctggtgtcttggaaatgtcatcggatggtgatgaatagtctcaatcaacggtgtcctttgaatcagttctctcggccaaaagcagtcagacaaagccattatggtgagagggacctatggttgtttgtctaaagcttcaaaaggatactgatacatggagtgagagagagtgaaaaaaaaaaaaaaaacaagcgaccaaaagggtataacggtaaaggggttttgagagggtttaacgctataactagccatgtcagttttcacctttacgacaaagcagaaaagtgaggacataaattagtgtctttgacattgattaaaaagataaaaagaaaaattataaaaagatattttgataatcatagctcacattttgagagaaaaaaaacaatgaaagattgatatacatatgatacataggtgatatgatttaataagaaaaaaaaataaaaaataataaaattatcaattaagtatttttaatttgtaggtgtcaaaaaaaatattattaaaaaatcataaaaaaatataaataatataatttatgtcttttagaaaaagattttttttttaattttttaactagtgtggttagtaacaatgttaattataaaagcaaaaacaggttttttttgttttatcatataataataggaggggatgtacttttgtggagcagaggtttcattggttaatagattggttgggttcaactattctagacttgtgagtttgagagggaacatcttctgactcgt

SEQ ID NO: 265 - DNA, 3703 bp, Glycine max
  source 1..3703: mol_type = genomic DNA
tcatatcttaatatttgtttttaagcctaaataaatactaagctggcatacgttcctaaaatgacatttataaacatcgaaggcttaataaatagaggtatatgtatatatatatatatatatatatatatatatatatattcataaatgagttaaaacagaattgacttgattaaaatttgtttggccttaaaaattgattagaacatttatttgaatttgaccaaaactcaataatgtttgaaatgagatagaaattaggtcaacctaatttattaacataatatttattactgtattaaacataactatatcttatagaattcaaaaaatataagaaactaaatttaagatatattttactactccattgattaataaataatacaaatatgatattatattaagtaaaatgccattgattagttaaataaaaagtcttattattaatatataattattgtataaaaattttaataaatgagaccctaaatattgagtcaaatcaactaaaagtacaacacaaattggccttaaaaccgctctaattccttaaaatgaaattgtcatcgtaagagaaaaatgaatttgcaacatcaacataatataatattgttggcaaacaagtttgtaccttaaacatgtatctcaatacttctagaaattaatccttaatatttagaagaaaaaaaaaacttcaagttcacccaaaaattgaagtcgcagcagagaacggttgttaaaattaaaccctacatgcaacttgtgtcagaaattaaaactttagttttgagttgataagttgatgttggtgaatggtgaccacgtaattaaaagttgagccatacccacgaggagttaattggaaaagtcgtcgttcgtcagaagaaggagcttcattctttatttatttttccgtgttttgactttgcttccaatttgaacacgcaaacactataaattacaaccacccaacccccacaccctctctcatcttcaacttgttcaactctctcaaaaccaaataaaatctttcacaactcaaaactcaagctccaaattttcactttacacctttgaattcattttttcacacatggacgagatcgacgtgcctccgttcttcgtgtgccctatttcattagagctcatgaaggaccccgtgacggtctccaccggcatcacctacgaccgcgacagcatcgagaagtggctcttcgccgaggtgaagaacgacacgtgtcccgtcacgaagcagcccctcctcccggacctcactccgaaccacacgctccgcagactcatccaagcctggtgcaccgtcaacgcctcccacggcgtccagagaatccccacaccaaaaccaccggtcgacaaaaccctcatcgagaaactcctccgcaacacctcggcttcggactccccgagcctccagctccggtccctccgaaccctcaagtccattgcctcggaatcccaatcaaacaaacgctgcatcgaatctgcagaaggcgcagttaatttcctagcaacaattataaccaccaccaccaccaccaccaccaacctactcgatgatgacatcgagttggaaataaaaacaagtacagcccacgaagcattgagccttttacacagcattcagctgtcagagtccggtttgaaggctctgttgaaccatccagaatttataaactctctaaccaagatgatgcaaagagggatctacgagtcacgcgcctacgctgttttcttgctgaattccttgtccgaggtggcggatccggcgcagttgattaacctaaaaactgatttgttcactgaattggttcaggttcttaaggatcaggtttcggagaaggtctcgaaggcgaccctgcaggcattgattcaggtgtgttcgtggggcagaaatagggtgaaggctgtggaggctggagctgtgccggttctggtggagcttcttctcgaatgcaacgagagaaaaccgatagaaatggtgctggttttgttggagattttatgtcagagtgctgacgggagggcggggctgttggcccacgcggcgggggtggtgatcgtggcgaagaagattctgagggtttcaacgatggcgaacgatagggcggcgaagattctgctttcggtgtgcagattttcccccacgccgggcttggtgcaggagatggtgcagcttggggtggtggcaaagctttgtctggtgctgcaggtggatagtgggaacaaagcaaaagagaaagctagggagattctcaaattgcatgctagggcttggaggaattcgccttgcatacctcacaatttgcttgcttcgtttccaatgagttcgtgaaagaaagaaaatccactttgtttttgttttgttcgtgacaccattggatgtaatcgattatttaagaaactaattccttctgtgagatctagtttgcggtgaaagaaaaccgaaagtaaatcacagttgagttttcaattgtagctagctagtttcttcggtggattcttgtttattattttgaattttggtgtttttcgtcattatgtgtacagaattgtttgggaacattcaaaggataggtgtgggcatcaaatgttgcccgaaacaaattggaaatttattgtcaattgcatatattaatggaatactgacacaaactcacactggttgttttgtggtgaacttcattactgattttgttattcactcctaattcttggatgttttaacattttattgttgatttaaaatttggttggttattttagaattccaaaatgcgatcatgtgttttttttcctcaattactcaattataccttaaaataagggattttttttttgacaaaaataatggaaagtccagtaaaaatgtgtctctctatgatgtttaaatgtgttccaaatgatttttaatataaaattttcttttttaatttcttaattaatgtcctaagataccgtttaaccagatttcttacttaaaaataattaaattctttatcagttaactaaagtactcattcaaaacattgattattaatcatattttcaactagtatatgattatcttttttatttgagctatgaaagatttcttcaaaaccaaatttctggttaatttagaagattcaaattcaagaaaaaaaaagaagagtaacatcagtagttacaagaaactgaaattttattccaagctcaatacaggagacctcttgataataatacaaaaacgatataaagccaaaaaaaaaatattcgtttgatgcgacatactagttgactcttaaacaaattagtagtacgttgctgttacttatttcatacaacaactattcttaatttttttgagaagtcagacttatttttttttaagtcatcaccactcgtaatattatcacattttcgagtttatgtaatggaaagggacgtaagttacatattatatacaattaattaatgtaatgccctatcacctctgcgtggacctaatgctttaatcgtttccacccttaattggaaattaaatcatacagctagattttggtatatctagttatacctacttctatatctgaatgaagaataagtacaccaagagggaaatatatagagcatgtccaaatatgtgagggcatagatatatagctggttctggttgttgaatatgatgaaaccgttaaataga

SEQ ID NO: 266 - DNA, 5897 bp, Glycine max
  source 1..5897: mol_type = genomic DNA
tctctctctcttttttgaatctttcggtaattctgaagcttaacactgaagaaactggtgaagttgggaatttcctttaattgcagcatgaggaatgtttgtgttcctagaaccacatgcaacacgtagaagagacaaggagagagacagaggaagaggcagagagaggagaagaacaaggagcttgttatcatcgtagggtccatggatgtaatggggtgcaatcaccttcatgagattattatccgactcaccagaattaatttatgtttctattagacaataactgagaagaaggattatgtacctaaagtgtaaaataattttatacaataaattattatttatgataaatttataaatttttataaaattatgttaaaggtcaaatacatttttgtgattagataataatataaaataaaattattattttatattttcagtgcattatcattaaattcataataatccatgttgaatttttctccgcctgaaaatactccaagactctaagttaacataatttcatgaaaactgaaaattggatctgttggctactatgtggggtcaattagcaccatctttacgtaagtaaaacaccacctcaaatattatggtagttgttggttaaaaatactaataatattatcattggttatcgagattgaagagcactgaaatgacaataaccgatgcttgaatttgaataaacgacacaagtcctcataggcttgtgtggcaataagatctccttaatactggtggagatagaaaaagcttgaataccaaccgcaaagtgaaggactaagagtgacaaaaaaccttgcaggcacagtatgctgccacgtgtcggctgatccatcctgtatgtgtggatgtaaggcttctatgaccaatccttttgtgtacactcactctaccaagcaactactataagtcacagcctctggtcacaagccacttagcattgaatttgcaattgaagttaaaagccttagccttccctacaactccaaacacaaagacatcatcatccatggctgcctccgtctccactgtcggagctgtcaacagagctcttgtatgatgcctttcccactttaatttgttacacttgcactttttttaattacaattacccttattaaggtcttatttcatatgcatgtttttcaatgcaagtacttcactcccctactttttttctttttacatgtcaatgatgccatgatatttttaataaaaaaattacgatcatgtttttgttctcctttaatttcccttacacttttttttcccacttagtcatcaatgcttaaaccttaaaaatggtaatgattaaatgatgaatagctaaaattcaaagtgtgacttaaaaaagtgtaaggggatgtaaaaacgagtaggctcaaatgaatgaatatacctcatgtaggcatgtagccttgtgccattttcaaataagttgtttactttatcttcattttacgtgtcatagtggcatagttacatgataagttcaaatgattgaagctatcaagtggcttcgtgtgcatgtttatacaactcatcattgttgcatgatataacatattgaaatcttaaaaaattaacgatgacaccccataattggaaaaatgttttattagttctgtacttttaatcaaatatggttcaaagtctttatatttttatattaatgaatttagtcttttaaattttgaaaaaattacgaatttaatccattttaaattttttttttatcatgttatagaaagttagaagagacaaaatctacatggcatttatagtttgagaataaaattcattaatataaaagtgcataattcttcactatatttgaccgaagatactatacaaaaacatattttctaaaaagaattaaggagaagagagagcaaatgtttgaagtactgaatatttattttactgtgacattgcagttgaacctgaatggttctggagctggagcttcagctcccagttcagccttctttgggaccagcttgaagaaggttattgcctcaagggtccccaacagcaaggtttccggtggaagcttcaagattgttgctgtagaagagaagaaagagattgaagagacccagcagaccgacaaggacagatggaagggtcttgcctatgatatctcagacgaccaacaagacatcacaagaggaaagggtttggttgactcccttttccaagctccacaggatgctggaactcactatgcagtcatgagctcctacgagtacctcagcactggacttcgccagtaagtagtcactatttattgtttttttttgttagttttgttagcagaagatatcgaatttgcaacttttcccctcttcgcttctcgtttatccatccaacccaccttatatatatctcccactagtttagtgttgtttacttctattttgttatgaacctgacccttaattatgatatgatggtgtttaaattaggtacttggacaacaaaatggatggattctacattgctccagcttttatggacaagcttgttgttcacatctccaagaacttcatgaccctgcccaacatcaaggcatgttaattactagaaagaaacacgttctctgcatcaaactactgatcttagctttttgcaaaattgggagacacattcattttttatttttttttcaatttttgcaaacaggttcctctcattcttggtatctggggaggcaagggacaaggaaaatctttccaatgtgagcttgtctttgccaagatgggaatcaagtgagtttctagctgaactagcccctccattatgtgcatttttagattcacgttagttcatccaaaaccacattgaaatatcagctcagctaatgtaattttatatataaaatcacttgttcgatgtcatgctgaggaattgattttgacttttaaacggctttaaaagtaacttttgtgtgttgggtccaaaattttatagtaaatttgggctgttaacttgctaattttaaaataaaatcgtctaaatataaatcatttcacctcaaaataagttttacaaaagctcactcaaacacacacaatggaaagaactgatgtcttgctatactcatgctgcatcaaagatttgaattattattgaacctcacaactaaaaaatccaacactctttaacttttaaacccctttgtggtattgtgattgattccattacagccccatcatgatgagtgctggagagttggaaagtggaaatgcaggagagccagcaaaactgatcaggcagagataccgtgaagctgcagacatgatcaagaagggaaagatgtgcgctctcttcatcaacgatcttgatgcaggagctggtcgtcttggtggaaccacacaatacactgtgaacaaccagatggtgaatgccactctcatgaacattgctgataaccccaccaatgtgcagcttccaggtatgtacaacaaggaagagaacccccgtgttcccatcattgtcaccggtaacgatttctcaacactctatgcacctctcatccgtgatgggcgtatggagaagttctactgggcaccaacaagggaagaccgcattggtgtttgcaccggaattttccgcactgatggtattcctgaacaggacattgtcaagcttgttgacaccttccctggccaatccattggtaagaaccaagcactacaacactaaggtgtagaatttggtggtacatgtgctaaaatggaacaaaacataatatataaattctattcaatgtttgatatgttctaaaaatagaacatcacggttagaaatctcgcattgactagtgatatactcaaaatagtctatataaatagaagaccatcctcacctgatgagatacttttaatattgaattagaatcaaactcaaattctaacctagtatcagacctgtcttataagatgttaactaaggatttgtatagtaggctatgcactgacttttacaaactacatgtataataagtttgctgatttttacaataactaccttaaaagtcgtaacagcaaatcctgattgattgacatttattctaatagtgcatagccattaaactcttgcaataatatcaccattgtttttcactttggatcttattttcaaatatttgtatagaactagtgaaaacaagaatgactaaagagaaaatactaatgttatcccatcccatgttgtactgcagatttctttggtgcactgagggccagagtatatgatgatgaagtgaggaagtggatttctggtgttggtgttgacagtgttgggaagaagcttgtgaactcaaaagatggacctccaacctttgagcagcccaagatgactctggagaagctcttgctgtatggtaacatgcttgtccaagaacaagagaatgtcaagagagtccaattggctgacaagtacttgaacgaggctgctcttggaaatgctaacgaggatgctattcagaggggaactttcttccagtcttgaattggaggtttgtatctagcttaatgttccttcaacttgcaattaattatagtgttaggttccaatatcacttggtctaaaattgttgaattgtttttttttctgtgcaggcaaagcaaacttggcaagtaaatatttctgttcgtgaaggttgttgtactaatccaagtgctagaagttgtgatggaacttgcgtgtaacattcttagcattctcaatgtcttaggtgcaaagagaagatgctaagtttgagatgatcttactatatttttcatattggaccgtcttcctctataattttgagttacagtgtccacttaaattgaatttggtgccttttccttttgtcctatattcttgatttatttttttaaaatttatttcttttgtttgacgtacaaatattagtacatatctagcccttatagcttcattttcaagtgctaaggatctgaagaacttggagagaaaggtcaagttcagagctcaataatgaatggcaagcggccaccaaatcataaacattacaaattgttccttatatacagtaactactttaggcccaaaaagaaatgagcacccaaaccacttatcaaataactcccatcagatgttgcactgataacactcttttaacgtgatctttcatttttcatatgttacactgtaatgttcttttagcatatgtacccttatgtaagtgtcgatggacattttcatgaatgaattattgaccccccgccaaaaaagaaataacaccaagaaaatgttatgcataatgcatatatgaccagagtggggctaggctatttatatggttgaggacttaaggaacatataaatcatgattagatgagacaagtaaagttcgtagtctttctaatcgctcgagagtagtggagagcctagttatgtttggataatcgtttggggagtccaagatacttatgccttactaaactcagtttactattatgtttggttgtccctaaaaaaattttgcacctacgttttgtgactaaattgagtttgtgtctatgtgttggaagtaatatatgggttgtttttgaaaatttatttttcgttggcagtatttattcaacaacacaagtaaaagatttttttattagtattatcgaaactaaacttattttatcgacatacttttgaaaaaattattcaaacgtaaattagattatagtaaactcttttttttttttttttatcaaacttgagtttacatcatacttttgattcaaattttttatgcaaattttattccaaacgcacttcaatatatttttaagtggggtgtaactaatgtgactttctctttatttgtgtctatgcaa

SEQ ID NO: 267 - DNA, 11025 bp, Glycine max
  source 1..11025: mol_type = genomic DNA
aatcgaatgaaattttttattggatggaatcaaatttaatttttaaatccaacccaattcaacaaaccaaatttgcatgtatatgcatatatttttattcataatttgataatatcactcatgtttatattattttatttcttgtatagttatagaattatcacataactaatacctatttataaaatatatttaattataaataaatttagttacataaagatttataaatgaaatatttgatattttaaattaatttttatcatgatttaatatattttttaaaaaaacatgattaaaataggaaatcaatccaatcaaaaacaaattaaaaacaaaattttaaacaaaattgattggatgatgaatttaaaaaaactaaaataattggattaaatgattttttttcatccaagtttaattcaatcgaatctaatataaaaacacccctacttactacccaaaaaaaaactaaaatgattggactagatgatttttttttctaagactaattcaatctaatccaatatggcaacactcctctctataacattaaaagtacagagttatgcattgttccacttaaccaatcattttcaaatttttattaatttctacatttttatctttctacatttttatcttgatcaatgttttttattgaaaagagaagtattagttacacattttttacttacttttttgaatacattattctcaatagactaaaaatttttttcattgaaaattataaaattagaaaaaagaatcattaagtataatataagatccaataatttttttttaattttcaataaattttaactaataaaagaatatgtttggaagcgtattagtaatatttattattttaaaataataacattgacataggtgtggtcgtacacgtgagcgcaccgaaacccaacccggacgtgttgccgtagaaaaaccggattggataatctggcgataggtccgaattttacaagtggggagagagagatttgttctggtattgttttgatcctcggtcaaaagaacacgcaaagcaaacccagtcacccccaacaaacacgagacaagccgtgtgcaaacaatagtcggtgtgaacccccaaaccctaatcgccaccacctccaatccttcgtttctatggtagcaactcattcccttccatcgatcattcaccgttccattttcaattcgctctgttccataattcgcttctctctctctcctctttttttttttttttttaattagaccgagtgctgttggggtcagcatgcgctagcttcgtcgtcgattttttggttggtgattctcgtgattcttttcgggcagaatttttgggtttgacggcatggatttggtaccgagcgtcaaggtatacgattcgatacatccttgattttttaagtttagtgtctcttacgcacgctcgttctgaattgacttatagatgaacaattaagcactttccctccgctgggggattctttgtaacgcgttgattttgcatgtgttgctaattaactttgctttgtacttttcataaaaataaacacttatgatttatttggtaatcagaagtacacgatgaagcaaattgtgtatgttattaaaattggatttgcacggatgatgaaggggcttttcttactggaaaattatacatgagccttgttgattggttggacttctagctctttttttttgttctttatatagtttttggtttgtatcctgtaactgattttattttttcctgcgattttaactactcagtacttactattttgacattatttatgttgtgattgataatgatattattggatactctgtggacaatgtgattccatggttagatactttttagttattcaattttgatcctgcactactttttagctacacttgaatttcatttgcattacttctgcaaacggtggtatttttgttttcttcttttgcttttaatgttttctatttgagtattggattttgtgtactgttgtattaatcattggggtatactattcattttcctgatttattgacatctctttgtaggaaaaattaaactattttcgtataaaagagctcaaagatgtgctcactcagttacacctttcaaagcagggaaagaagcaggtgagataataaaatactattacctagtctgcctttgttattgtgaggctttttctatgatgaaaccttgaacgcttgtactgactgacaccctgttgaatatcatttattccctgattgctgtttataatgagttcttttgtttataattttcttttcttttgcattttctcaacatgttacatgcaatatatggatcattgtatttggactgtatggttagacatcatacttaatggttaataatgtgatttcataactcataaaatatatggatattgtcaatttatgacattagttttcattatattgttgtagtatctttggtttggactccatggattatttcctttttaatcctaaatttaatatgctgtctttcagtttttggatgatacactgatgctgtgttttgtctttttttgtaggatcttgttgatcgcatattatctgttctctcagatgaacaaggtacaattatacacacatgcacagacccacaggagtcaacctttggtctaattctgttttattttcacaattcttctgtttgagttgtgattgtgcctatacattggaataaatatgaggctcactttactttgtagtgtgtccaattacagtttgctcacatgcctcattctctctctccttcctcctttttcctgttaactaagcaacttgttgctcttttcccagtttcaaaaatctgggctaagaagaatgctggtggtggaaaagaacaggtagcaaaattagtggatgatacatataggtcagtcttagcaacaacactcttgataatattttcctctagcttttgtatgcttcagatgcatgcagtgacgtaacatacttggctgagttcacataaatgatctggtaccttactattaggtctggtttaagtcgattatagtgctccatatatgctgtaatttattgtctttgactttgttatcttttattcacattcttgtatttccttttatgcaggaaaatgcagatatcaggggccactgatctagcttctaagggacagggtgcatcagatagcagtagtgtaaaggttaaaagtgaatttgatgatgcctttcaaccagatgtgaagattcgctgtctatgtggaagtagattggaaacagagaatttggtcaaggtgtaccattaaatatggtttcttctttctttatgataaagagaaacactttgcatcagtacatgcagatactatttattcagtcaatttataatcccatccgcttttttggtgttcagatgcacttttcattatagctcctatatgttgcttactatgataattttggaattttaattttccttgtcgtattgcagtgtgatgatgcaagatgccatgtgtggcaacacatcagttgcgttattattccagagaaacctactgaaggcatcccactagttcctgataaattttattgtgaactctgtcgtctcactcgtgcagatccgtatgtcaaatttctttcttactttagctaatagctatatgcggagtgagcaataatgatttgtctactgggttttccttgtgatgaatttttatttttgaatttcatgttaaagggttttagcatgccatttttcttcttgggttgcatggttaacatttccttatgattgcatgatgaactgggcttctgtagttgtgagcatggttatcaaattcatgagttgactcgtagaattgcacgagtttacgagtgcacaaccaccaaccgggtgaactcgcaagcaaacttgttttttggtggattcgtgcagacttgagtagaattgcttaaactcgtgagtttgtgggctagtcagcgagttcagtggtggaggaaaaaatagccttatcgacgctcgttttgggcttctgtttgtgatttctgttactcataaccccaccatgtttttgaataaaagctggaagttcaaggggtgttgctgtaatttactatttttcaattagcctaaaacaagtgcaaccccctggaggaaaaaatagcctaatggacaaagaacatattatttactatttttcatattttttccactcaacttttgtatcttctgctcttttctgttacagattttgggtttcagtggcgcaccctttgcatcctgtgaagttgaccacaaccagtaatccaactgatgggtgagtacacgtggtgtgggtttgttgaaattaatttggtgtaattgggtttatttctgaatgccttgttaatatatatcttggattttaaatatactgtttgttatctaatttgcatataagagactaaaatgtccttcattctggcttgaattcttcctcttttttttttggggggggggggggggggagtgcagtggggggaattgtctaattctttttgagcacgagtgcaagttccttggcttgatgataagctttttaattgcttttgagttatgttgatgcagtgcactgtatgttttgttaattaaaattctctaggtgttgaatttgcttttctgtggtggaatttactcaggaaaataacctattgtacattttctccttttctttcatctctatctcaatgtttccttaaatctttattaggtggagtttggctattaaacttcattttgtttccaagacacaaccccgtgcaaataattatctgcattgatgtttaaaaccaaattttcaatgtggctttcttcctgaatgacttaagttaaccatattcctttctgaatttttcagaaacaacccagtgcagagtgtggagagaacatttcaactgactagagctgacaaggacttggtatcaaaaccagaatttgatgttgaggtttgtttggattttcagtgcatgtatattaatgcatattcttctatgcattggtttgcttacttattgaacaaatgacttgtaggcttggtgtatgctcctgaacgacaaggttccattcaggatgcaatggccacagtatacagacctgcaggtcaatggtatgttttaagtcatgctctccttactaatttggagttagatttcatgttggaagtctagtttatttttcatggtatgttatgggactagaagcacataattttaaagtaaaataccaaatatctgtttgtgatgaaatctattttccttgatttgaccattatgattatataggtgttcctgttcgtgcaactaacagacctggttcacagttgcttggggctaatggtcgggatgacggtccaattgtaagtttgttgtcatatacagttatgaattgtacaactatttaaaattgtgagacactagttcatttactatttgtatttgttttattcactttcttatttgtatttctcctttgtcagatcacgccatatacaaaagatggaattaataagatttccttaacaggatgtgatgctcgcattttttgtttaggggttcgtattgttaaaaggcgcagtatgcagcaggtagattgttctcttggcttgataaatttataagcaaactattttgaattactgttggttccttaatccatccttgtgatattgaataatcaagtttgaagtatttccctgtatgatgttgggcaaagttcctgatgtggtcccttttgattgatttcttaaaatttgaaacttgacaaatcatgacatgtttttgcaattatctttattgacaattttgaataacacctaaccacactcaaccttggaagatgtttcttcttccactataaattggaaagcatgtgtatgggcttcagaaagtgttattttgtattgatttttgtcttgtagtttcttgagcattattttggcttaagttgtctggcttatgagacttttttgaataaaaaatgttgaatttttcacataatgataactagatctggtttgggttttgaccaagttttctggttttaattggttgacttgcttttggctcaactttttgttttttgttattgagacagactggaagcctggttgtctattgttgaactgtcctatcagtctgtttttaaatgttggtgttgaattttttgttcctactttgttgtgaatatgcttacatacaacttcttcccttccgttactcttgtaaattgttaaatagttgagtctttgttatctagatcctaaactcaatcccaaaggagtctgatggtgagaaatttgaagacgcccttgcacgtgtctgccgttgtgttgggggtggaaatgcagttgatgatgctgatagtgacagtgatttggaagtggtttcagatactttcactgtcaaccttcgttgtcctgtatggctttcatcaatagatgaattattttagcaattcatgaagtcctactaatcagttttttatttttggtgaaaattttagatgagtggttcaagaatgaagattgctggaagatttaaaccctgtattcacatgggttgctttgatcttgaagtgtttgtggaaatgaaccaacgatcaaggaaggtaaggttctaacaaatgttatattgcatgaagtgtccactccccaaagttgtgatttttaagtctgatgaattgaattgtttgttcagtggcaatgtcctatatgtctcaaaaactatgcgttggagaatatcatcattgacccttatttcaatcgcatcacttctatggtagttacttgaaaatttaatttcttatgttcataaatcttccattcgacaaaattctgtagttatttaaattatattggtggtacagatgatgaattgtggcgaagaaattgcagagattgaggtgaagcctgatggttcttggcgtgttaaggtaaagagtgaaagtgaacgcctggaattagggaatctagcacagtggcgccttcctgatggaaccctctgtgtgtcaactgctggagatgtcaagagagtggatacattgaagcaggttaaacaggaaggtgtttcagactgtccggctggtttaaaacttggcataaggaagaatcgcaatggagtttgggaagtcagtaaacctgagggcacaaacacctcttctggtaataaattgaaaggggcttttggaaatcccgaacaggttgttattccaatgagcagcagtgccactggaagtggtcgggatggtgacgaccctagtgtaaatcagggtggtggtgggcatattgaccattccactacaaatgggattgagatggattctttgtgtctcaataatgttgatttagcatatgaatataatgaacccaacacttctgctcaggtgggtggtgcagaagttattgttcttagtgattctgaagaagacaatgatttgttggtatctcctgcaattgcttataagaacaacagaaatgatgctacagatggttactctgtaccaccacctgtaattgttgattcatatactgaagagcataatcttggtggaaattcatgcttaggactctttcctaatgatgatgaatttgggatgtcttccctgtggtcattgccttctggaagtcaggctggtcctggattccagttatttggttctgatgcggatgtgtctgatgcgttggtccatctgcagcatggtcctatgaattgctcctcgtcactaaatggttatgcattggctcccaatactgctttgggatctggtagtatcttgcaagagtcctctgctggtcggtcagatgctgatttgaatggtggtttggtggacaatcctttggcctttggtggagatgatccctcacttcagatttttctccccacaagaccagcagattcatccatgcacaatgaattgagagatcaagcaagtgtggctaatggtgtctgcactgaggaggattggatatccctcagtcttggaggtgggactggtggtaacaatggtgatgcttccactcaaaatgggttgaattctagacatcaaatcccaaccagagaaggtgccacgaatactttggatgatactggtttgttgctctctgaccttgctgaaatgttccttattttttagtggaagttactcttgttggaaactagtttttatttcatggcagtgtgcagttgagtgtgactatagctaggaagtggagcattttttcaacggagagaataataaaatatatttaatgaagcaaaattgaccatatcctttaaattaataaaagtaaaaagaaataaatagcagattttttataaaataaaagtatgtccttgttatatatgtaatacatcataatgtattttagtttagatagatgtaatttataataaaaaattataaagtagtttgataaaatacatactctgctaaatagaacatattggccttaacaattgagttttgggacaagaatatttattatccttttaacacttgaaaatgtatgcattcttaaaagcatgttaattttttttcttggacacctgtctctgctatctatgtgtctctaccgtagattttaattcttctgagatggagagtttttaattctttcatgcgtgatttttagtacatccctaagcttcatatcaagtttatttgagaggggctatgaaggaggattggaagctgggtattcagtttctttgcatcgagcactgctataccttctgttaaatggttagaaaccttcaaatgtttagttgtggatttgtcaagatacactatatggctgtgttaatctgctgatgcatcatatccttgtgtcagaaaaagaaattttagaactctattcctaaaatcacccaaatgcccataatctgtttacttacatagaaatcagaaagtataaatggttatttttattacttgaaaatgtggaggatgttaatctctaaataaagttgaggaggttggtgttctctacatctatatgcattttgcaccttcctccattcttctcaccttcattttgtttgcctccctatcagataattgcattttgacctgagttaatgatcattaatgctgttttgaaattctacttttccattacttttcttgattagttattcctctttatgcagcttctttactccttgggatgaatgatgttagatctgacagggcaagaaggcaaagatcagatagccctttctcctttcctcgccaaaaacgttcagtaaggccccgcttgtacctttccattgattcagattcagagtaaaggtcataccttgtgtctcaagaattttaggtactcttaacaccagatttcgaatttagaaaaattgaagaaagttgagaggcatttttggtcctcatgaaatggcaattaatacataatgataatgggtctgaggcatctctggtggaacagagctacaaattaccctgtgccaaaatgcttgcacccacccccattggcaaagatgttgtggccgtaatgattctttatgcttgatatctaaattgtccttgtggcagatgttgatagatggactttatcagccaaaaactctccattatatctgctaagagctattattcccgtcaattttttatgagggtgtatgccggggttatagtgctggtttattgtatagttaatcattcaaatctggtagttcaaactttcaaaaaagttgggtggaacattatatctgcatttttgtctctgctaagagcaataacctgtaaatgtttagccatatcagatccaacagtgaaatcaaagatattgtttctggtcatttttctagaatactctgttgtgtcagtatcatgcctcatgattggccaagaatggtaaacgcctatttcatgacacctggacgttgatatttgtttaacatgtgtaggcatctgtgatgcctccccgtaaggatctatatttgatttcagatgagctttctttgtttgcatagttgagtaaagagaaaagagcccccgaaacgtaattgattaagctattattttaagctcgtttggcggatcaatataggttgatatctgctgtataaaaaagtagacactggaggaacatcgtttggttatggtcaccattgccatttctgttcatttagtgctggttgtttatgtagtgaattcaatttatattaaattcaagtttttgtaactttttgatacgtagtaaggaaaggatgatggataagctatgaaaaagacgctgagacacactagaggcacgtctgaataagtaattgatttttttttttaaaataggggtgtatgctgagtaagagaaaattttctaagcttctcatagatattccaaagacctcctgggacatttttaatgagttgcaaactcattaaacattaccctgtcatcaaaatttagcatactcgtttttcgttaaattccttatatcttgagaatattttttaaacttaatttgtgttgttacttatcactaaattaaattgatcaaagggtctagttcagtttattgagtagaatgagttatttctttgattatatgttacatgttcaaacacaaccagtgtccacgattaaaagggatcaacattttaaaaaaagttatgtaataatattttatgttgttttcattaatatattgatttttttatttatcatctaaaagaaatatttttttattcaaactaaagtaagacaagttattaaatagtattattcttctcatcattagtttttcctctaatgattatattaaaaaattcatgttaaataatttttaactaattatgatatcaacatataatgaatctataataataaacttaaattgtttacttttttaacaaaataaaaaacacaaatcaaaacttaaattataaagaattaaactagaagttaatatattattaataaggaacataaatataagttttaattta

SEQ ID NO: 268 - DNA, 4330 bp, Glycine max
  source 1..4330: mol_type = genomic DNA
actaagaccattttatttctcctggtaaagctaatatctatctatcgcttcaaattttcaaaaaacctgatcggtatctaccactttggaattttctacagattccttcgtgtttattctaaaatcaatgaaacggtgtttcttttttgttacaaaatcaatgaaacggtgtttaaagatttaaaaatctttcaacataaaaaaaaaaaaaaaaaagttgaacataggaagtaataatgcttattttgtatggttatttattcctattattttattgcacgtgcatcactgactgtcttctagttttttttagcgctattttcttatttattgaaaacctcatttatgttaaatgaatggaaggagaaattcatcttattttacgtattaaaataaatattttaaccaacaataaaaaaaattaattaaagtggctttcaactatcaatttctttctccccatctcttctaaaattgacttttagttataaaaaattggttgacttttagttaattttataatttaccgaaactcacttgttatttttggcgtcatttatatctattatatagaaagctacaagtccaatttaaaggtaaacaagcagatctcgtataatcgggctacgggcccagtttcgtttaaacgaggcccactttccagacatcagtaacatagacgaagctcaatatataataataatcatagcaaagattaacatcacaagatatttatctttatccaataaaataaaaaggtttagcaatggcataattgagaatgtacgcaaaaagagaggtacataacggaaatataaaaaaaacgacgtgcgcgttttagtggttcgggaaggttcgagcgccacgtgccagctggttcgggactccgacgcatgataacgcgactaagaaatcgccacgtcaccatttctctggggtgcaattaaaaaatatcagaaatatctagagaaggctataaatagatattccaaggtgccagcccagagatttttctgaatccgctatagccataactcttcacgaacaagaactctactattactattaatcaaccaaaatctctcttcactccaaacagaacacactagcgagaaaaaaagtgataagcccaaaaactctgcgttctctcacaaattaaacagcgtcactatcgcataggttagtagcattcttccgattctttctcatgtcttaataactgtttctggatttccattctgcaaattcctttgtgcgatttttgtttagggttttctttatttttttttttaatttttagggttctgcttctggtttatttattagtcagtgtcatgcttttataggttttttttattaaaaaaaatagacagaaaaaaacgaacttgctgagcaagttttttatttctattacttggggtttagctttatctattacttggggtttacgaagattcgtttcttgattgaatttattattatggctgataagttcgtgttgcgaaatcctctttatacttttccacctttgtgttctgttttgttctcttggttactgaagagttctgttttttttttcttcttctctaacagattgtgaattcagtgattgagttttgcggtgtactgtgttgcgaagtctgtgtatcagatttgtggacatgggtgcttatgatcaagtttctcttaagccattggattcttctagaaagaggaaaagtaggagcagagggtatgggactggatccgtggctgagactattgcaaagtggaaggaatacaacgaacatctttattctggcaaagatgatagtagaacaactcgaaaggcaccggctaaaggttcgaagaaagggtgcatgaaagggaagggaggacctcaaaactctcagtgtaactacagaggagttaggcagaggacatgggggaaatgggttggtgagattagggagcccaatagaggaagcaggctttggttgggtaccttctcttctgcccaggaagctgctcttgcctatgatgaagctgctagagctatgtatggtccttgtgcacgcctcaattttcccggcatcacagattatgcttcttttaaggaatcgttgaaggaatctccgatggccgcatcgtcctcttgttcttcggcagaaactgcaacatctgacactactactacatccaaccaatcggaggtttgtgcagctgaggatgttaaggagaatcctcgacttgtcaatgtgaatgataaggttaacgattgtcataaggcttatgaagctgcctcaccaactagcagaatgaagcaagagcctaaggatgaggctgtggatcacatggtccccggggctgggaaaattctagatgtcagaccagaaggaacacatgatgccgggcaggttgcagaggatgtaaacaaagatcagatggacttgccatggattgatggctttgattttagtgacaattacttgaacaggttttccacggatgagttatttcaggtggatgaacttttggggcttatagataataacccaattgatgagtctgcgttgatgcaaagtttggattttggacaaatgggttttcctggagatggtaatcctcaggtggatgatacgctttcaagctttatttatcagttgcaaaatccagatgccaagttgttgggaagtttgccccatatggagcagacaccttcaggttttgattatggattagatttcttaaaaacagtggagccaggggattataatggtggaggggaagaaccgcgatttcttaatttggatgatgatctgaaccctgattcaaagggcatgcaagcaaggaaggatgactagagaaggcgacgtgcataagtctatcatctgcctcattttcaactggttcgagcatctgctagtaatctgtctcttaggttgttgtcccctttttagctatatacaggtgcataagaggaatacaactatacaactaatacaagaaatttgatttgtttatgttcttttaatatgctaattctctgtaagattttttaaaatggagaatttagctgtgacaatatttgttaattctttttacttacatgttttttgggattcaaattggactgcctttaactacataggtggagctgaggagtagactgtttgaagtcgtttggctgactatagttgagcactgatttggatacaaaatttctttgttatgtaccatggagaactattatatctcgagtatattatatcgttgctcactttttgtgtataaaaactgaacaagtagtggaatgtatatatatataataactattctaaattttgttactgtccctgtcgtgttctttatttatacttgtcctctttggtagttcaattggatatgcatagtctatttcgggttacaggggactaaattgtcagggttgattccaatagaaacgaaaatgttagttttctttatctatgagcaatagatgaataactttagctattggataaatgaaactattatcaagtatgttgttttaatttagttcatctctttttctctctatcacataattgtgagcactttcatgaagaagaagactttaaatgttacatttttatttgaacgtttagttatttaaatttcgcatgacctacttttaagaaattattgtggttacatttttcaaacagtttaattatttatgtttcacaactcggttataaaagttattgtgatgatatttttcaaagagaaatgacaacgtataataatttatataatattacatcttttgtttatctctttcttacatgatattatatattacattttaaatttaaatttatctttttttcacctttttagttgtatattttgttttgcaatttgtcatactataatatcttttttttgaaattcaaaaatttaaagattactataaagctaatgtgaaagatacggaatttatttgataaaatagggatctagaaaaatatataaaaaaagactaaattatgtattttataagaaaatagttgataaaataagtgatacctatatcaaatattagaatatatatataaaaaatttatcttaagaatatttagattaaatttaaaaaattaaaaattaaaatatatataaaaaaataagatcagtttcctatacttcatttgtttgatctctacattcgatcggttcaccatgattctgaaatattctaattttttaaagtgtttagatcaatcactatatcgatttttgaccacctaacctattgaaacaatcatccgtctgatttttaaaaccatgataattacaatttcaaaaatcc

SEQ ID NO: 269 - DNA, 3051 bp, Glycine max
  source 1..3051: mol_type = genomic DNA
atcatttagttttccagaaaataatagtttatataagttaattttaatttattaaaaggtttgtttttattatacatacatgataatatacacatatataacaacaaaatcattgaaactaagactttgcttgcacgttacagccatagttcatagctcaaccaagtgaccaaatcctcaactcatgtcatgtttcactttctttacctcctcaactgtctgagaacaaagtcaacaagacttaattatccataaaatttgcaatgcagaaaatgttacagtcaatccttagaaaataaatatattcttctttaaatattattacctccggtcctttgtaatacatgaaaacttattttatattaaaagtactggagagtataaaattctttcatatggatcaaaattaaatcaagtaatactttaaaaaaaagtcaaatcaaataattaatactccccctattttaaagtaaatgttattctaagttactctacaaaaactaataaataaataattttataaaattaatattattaaataaatgaaaaaaataatactagtattacattaaaaaaaactaaagtacatcttattagaaatatcagtgaacaaaaatcattactaagttagagagattcaagttacttaaattatattatttctaatttcaagtttgagaaattaaccatctacataaggtataaagaaacacttgacaaatagatagttgaaaaaaaaaaagcagatgaaaaattcaaaggaaaagcacctttttaaagtaaagacagtagaaaagacaaacatgatgaaaatagtagtataaaaaggggatgcagttgatgtggagcaagaaaataaaagctgaaggcattgaggataaagaataaataattgctgaggcaacacgatgtttcgtggttccatcgtagcacgagggttgaaagtcgcctagacgttaaaaaatttacctttctccccactatatatatgcctttccactcaacttagatacacaacacaatactcttcaaacactttaccttcttcttaagacaacaagctaaaagcgcttctaacttaagtgatggctaacgctgctgaagtttcagcgttgaaacgcatcaagttgcatcttttgggtgaactctctccactggccactccccaaaacaaatttgaccaaacaaaccctagcccctctgaatcttccaattccgaatcttcttctatttctcttaaccactacttcactgacctcctcgaacccgaaattgaatttcctctcttcgaattcgattccaaaccccaagtaatcgacctcgaaaccccgaaaaccctaatttcagctgagaagaagcctcaatttaatcggaaaccgtcgctgctaatcgctgttccgaagaagaccgagtggatccaattcggaaaccctgaggtggcggcgccggagaaccagcctgagaagaagcactacagaggtgtccgtcagcggccgtggggcaagttcgccgccgagatccgcgacccgaacaagcgcgggtctagggtttggctcggaaccttcgacaccgccatcgaagccgccaaggcctacgaccgagccgccttcaggctccgcggctccaaggccatcctcaacttccccctcgaagttaacaccgcggcggagaccgtctccgtcgccgccgtcgacgtcgagaggaagcgccgccgcgaggaggaggaggtggtggtggaggatgtaaaggcggtggtgaagaaggagaaaataacggagcatgatgtgagttgttttagggggatgccgttaacgccgtctatgtggaccgggttctgggacagtgacgtcaaggatattttcaacattccgccgttgtcgccgttatctccttttggattttcaccgctcgtggctgtgtgaaattccaatttaggactgcgttttttcgtgttttagtacttacagcgtcctcctgttcagggatgagtacattgtacatttgacgaatttgtttattcaacaatcttttattcacttttatttgctacatacatggttcattttttgtcttttatgtcaaattttaaatatttgcaaaagattaatcacttaaaccttgaaaactttaattgtatcccgtgaatctcataaccgaggaaaagattcacaaatttttgcatacttttacctttgtttaaaaaatgaaacatccatgagcttaatctcctaataaactattttcaagagcttaaaatcaattaagcatgttctgaactatttttaagaaacagagccgggttaatcgaataaagattgggtaacccattacaccaagtcttatttatagctttttagttgaaaattacaattctgttataattaattgattacaagaggacacaatcaattaaaccaagaacaagccgtgctttgtacaagaacaaatgttgttttagtcgcttaaatctattactttgttattcttgagaaaaccatgagttattattttaatcgattaccagcttagtctaatcaattaaaatgctcttaaacttgtctagaacaactcagacattttaattgattacttcattataatcaattatttcagttagtttttgaaaaatattaaagccaattaggctctcattctctcataacttccgtaagcaaaatttcggaagtataattgtctttgagggttttgaacttcttcaagatataagaaaaacatcttcgcataacttgtttaccccctttgttgttgataaccatggattagtttctacatgggcaaagcaatctatatatagttgtgttcttcacattcaggggaatatgttccttaatcttttgatttgtaagaatttcatggatcttgagataaggtttttcaagggttgttcttgttacaatatttcataagaagggtattaggattcttattgtagggttcgagaaaaaagtgtaatgtaaaatttcattatgtatgccctgtgtgtttatattaaattctgaaatctttaatggaattcaatcttgttagatt

SEQ ID NO: 270 - DNA, 4024 bp, Glycine max
  source 1..4024: mol_type = genomic DNA
ttttataaaaactaaaaaagacaagcatgtccctcttgtccttagaaaagagtttgacaaagaggtttagaacatattggatcacaggatcatgggtcagagctagaagaatataaggaatgattactcggttcaatggaagggtgagtcagaaattgatgcaagatgggaagagagattgaatggaaaggaatgtcgacccattaaaccgttgacatgtattagtcaatgtaagcatgtaacgctcaacatctaaatttggatttagagatcaaaattgtgtgattgaatataaaagaaggattaaatgtgtaaataattttaaagggggggaaaatcgaaattagaaataaataaggaaaacaaatttacaatttgacctttttaaaaagtctaatgatggttaattttatctcacaaattattatagtaagaacataattatatacaaattatataatcatctttaaccattaaatacatgtatataaattgaaattaattagtgtcatgtttttttttccggggtaaaagattttagtgattttattgtattagacattaattttgcttgtagtatgtgattatagcttattcacaaaaattttagccacaatgaaatttccaaacgcgacaggtcttacgctctgcgccaatcctttttgttttgtgggtattgatattttgtaaaattaataaataaatacctggattatttattaattattaattaagtttttaagctaaaaaaaagtatgattaaatctcttatttttctttttaacttaagtacttaaaattttaaaattaccgcaaattatcatttttttctggacagttttaaaaaaccaatcacaaaaggttgcaaaatcaagaacttcatcatacagtaattttttaatttataagcttagttaaaagctttcaaataatttgggaacctaccaagtactaattaatttatcatttattttgaattggtacatgatactactacaatacaagggctaagatgagcggcacgcgccatgtattggtagtgggattagaattttgcttgtatctttctgtcatcctttacctcgcacttcgggaactgctgccactttcaccctttggattctttccttctcaaaccacaaagcaatttgtccaatttggatcacacactcagatacagccgtttagaaagaccttcgcatttcacttttctttctcttctcacacaagatagataggattttctttcttctgctaccttcaaaacatcacaagaagcaacatccccctatacgagttaggtgagctcagttcaacacatcgtgtgaaaaaaacataaagggagaaaattactattttgtaatttgtatgtgataaagtgcccatcttgatgtatgtacttcttcacttctttgtatgtgtccctagtttgagtgtaatctaaaacattttgaagtgattaaggtgccaagatgtgactatgattgtgttgggtgaaggaacatggtttcatggttgtgttgttgcctttgtgatccgtgagatgaaatgagatgagatgtcagaaaacatgtatcctaggttgttgttttttgaccatacccattcgaagatggtatgggttaagcatcaaatccagcaaaaagatggttacttgagctactcaccaccccttttgtcttcttcttcttcttcttcttcttcttcttcttcttcttcacccccttaccctcttggtgctactttccacaaggaatcatcattgccttcttcaacaccaccaccaccaccatctggcaccagaattagtcctgctgttcttttcatcatagtggttcttgctgttttgtttttcatctctggcctcctccacctgcttattagatttctcataaaacacccttcttctgcatctgctcaatccaacagacaccaagaactttccacatctgatgcactccagaggcagcttcagcagctcttccacctccatgactctggcttggatcaggctttcattgatgctcttcctgttttccagtacaaggagattgtggggttgaaggagccctttgactgtgctgtctgcttgtgtgagttttctgagaaggataagctcaggttgttgcctatgtgcagccatgcctttcacatcagttgtatagacacatggcttttgtcaaactccacatgccctctttgtagaggaacacttctcactcaagggttttccattgagaaccctatatttgactttgatgatctgagggaggatgaagggtgcccttgtaatggggagaatggattcaatactaggcagaaaacagttgtggttgaagaaagtgtggagaaagagaaaggtgttttccctgtgaggcttgggaaattcaagaagctgagtgtgaaggggggtggggagagtgaagtgggagagacaagtagtagtaatttggatgcaagaaggtgttactcaatggggtcttaccaatatgtggttgggaattcagacctaagggtgactttgaaccatgatgaaattggtaaaggtcaagtcacaaggctcaccaaaggaatggaacttgatgatgggaaggtttcagtggaggagggggatgtggaagcaaagaagattagtagtgtcagtaaaggtgacagcttttctgtgtccaaaatctggttgtggccaaagaaggggaaattgcctacttctttggatggtcaatttggcaggccaatgccttcttatctaaacacagattttccaaggatgagggaaccagaaggggcatgaaaggtatccatccacatgtttttactttttttttttctttttcttatttcacttgaattcgtttcaatccattgattaaagctggcttcccccacttgccttacaattccaaaaaaaaattggtgtgctaattttgacattgtgatgactgattgtgccatactattgatgtattatgattgtacttcatgaagatataagaaatactgcatctctttctctttcatcaaacagatctcaggactcattggttagatggaattagatttgtccaaggttttaaatacacgatttctgacacaacattaaggattttgaggtatctgcaaccataattctgactgcaatttgtctacaacttatcttcaatttcatataatatcaaagaacatgaccaaatcactattataaccgcaaattaaaacattagatttgttataataaatgttgatctcaggttatttggttatgcaaagtgcaaacaattagacatatcaagatatccttgctagattcattaactccctagtccaacaattttgtatcatttattttctcataataatgtacaacagacagatctacagtagctgattgaatatggttgtggagtgtagcctgtttcaaagccagacttgtctctttctttgtcattgttctcttgccatcagtgtgtgtatactttgatcatgaggagtggcaagtgcacttgctttcttttctttttaagggttttggttttgtctagtctctctttttctttattatttcccattgcacttacttttttgagagagggtgaaatgtgaattcaaaactttttctttttctttcttctaatatctttttggctaggcagttactgatagtgggatccataaaagctggcgtcatagaatctctttttttccttgtgaggagtcttcttgattcaaaaaaattgctgtggatgaaccgtgtggggccattttacaccccctcccatgtgtacattttgcaattaaagatagatttagattatatcaatcataatgacaatcaattagaccatgttaggtaaaaaagaaaatgataatggatttgctcaattaactactagtcccaaatgattacactttgcttttgaaagaaaataaatagaaaaagtgaaataagagaatttatgtaaagagaaaatagaaagataatgaaaaaaaattagccgttcttttatttgtatgagactacactttc

SEQ ID NO: 271 - DNA, 5533 bp, Glycine max
  source 1..5533: mol_type = genomic DNA
ttgaactattgttaaaactgagggaagtgtttgaaggttaagtcaatcccactatatagtttgactttaactaagtgctcttgcttttcctaaatggacagcagggattggctgtgactccaaaaagaccttatacacttggtgacaccactggacctgtacttgcacttcctttttccaattttttaacctaacaaaagcaaataccaaaataaagtactctattatagctactatcatttacatctattatcatatcatctaaatacgaatcccaccattgttatattattttaaattcataaaaacattaatttaattttttgatgaatttagggtatctttcatagaatatctggatttaagtgttcctctatagttaagagcgcgtcaatctgaagtcactctttttattatatatattttttgtcgtttttcgcatttgaatgtgagtttaaccgtttgcttgcgttttgaaagccaattcaaacacgcattctgtcgcccagttaaaatacttattttttaaaatactaatatttatttaaaaggttgatttttactataataacaaatatttttgtataaatacaaatataaaaattattttgaatgataaaattatctattaaaatgatgatatatacacgatgtgatcgaggatcccttctgtctgaagcttatttaaagaggcaataatggggcaaagggaaggtcatttgggaacatgagatagataaaataataacatccactcataatatgcttaatgtttagatattgatgtgtgctaagcatagttgaacaaaaacaattaaaatataacattgtcggtggattcatggatttttgatgtaaagccaagctaagctaaggttgacacttttttacaccaacttttctctctctctgtgtacagcctaagcttaagcttatccctccccacttgttgcctctgccgtatgttatagccaaaagggtgtgtgagagagagaaacataaacacaaccaaccatcaagggaagttagagagagagttgagttgtgttgagagagatagagagatagaggagaagatgaacggtggtgaatcttacggtgctattgagacacaatacataaggaggcatcacaaacatgaaccaagggaaaaccagtgcacctctgcacttgttaaacacataagagctcctgttcaccttgttagtttgtttttccatcttaaacttttttgaccaatatcatggttttttgttttgtttttcttctgaattgggtgtgtctggtgggtgggtctgatttgtgtggtgtggtgggaggaagttttttacttttttgttctttggagatctgtgaggctatgcttgttttgtggtgtcttctttgagtttccaattttgtatagttatctgggtgtgtgactattagcatttctcttgtttttttttgtctctttcttggggatgggtggttaactggttattctagaattttggttctgtcagggtgttgcaaaagttggatttttcagctcattagatgatgttttttgttgagttttggcaatattttaaaaatcgtggttgcgattgcagtttcgtcatcattattgctattgcaggcaattgtggacaaatatgactgatgcggtcacaattgctgtcatgatgcacaaaaacaatgatgttacggccgaaattgcggtttttttaaaaccgtgcgttttggtgatgaaatcagttttgagggaaacatagttacataattgaagtttttcttttgtgtgtgtggatttgtttgtcaaattttacaaaagttgaatttttcagctcatgaggtgcgagttttttgttgggttttggcaagattttaaattgcattcgccgctgcgacagcatcaccatccttgctgttgtggaaaattgtggagaaatatgattgatgcagtcgcaagtgatgcagttgcagtgacatcaaaaactttgtcgctgtggtaacggccacaattgcagttacgaagcagttgtgctggcatcatcaattgcagtgactacaaaacattgatgctggttatcggccacaatttcagttgtgatgcagttcaatgactctaaaaacgatgatgttgttggctgtttccttgttttttttttgtgtggatttgtttgtcaaattttgcgtttcaattcttttggttatagagcttgagtggaaaagaaggaaatctgaaaattttacggctggattttggatgcaatacattttgcttagaagctgatgagagtccttcactcatttgagtttctcatctctataatgccctttaattgttttttccttgcagacttgttttcagtagaccaagtaatatgtaacattcttaacttttacaaaattatcttccaattttattctttttaggggactttctattggaatttagtgaaattgaagaaataagtatatgtgatggtgtggtttgttattttgtggattttgtagatgtaaaggaaagaatgattattgtttgatgtggtttggttatttcccttctcaggtgtggtcactggtgagaagatttgatcaacctcagaaatataaaccatttgttagcaggtgtatcatgcaaggggatcttggcatcggaagtgttcgagaagtgaatgttaaatctggccttcctgccacaacaagtactgagaggttggaacaactggatgatgaggaacacattctcggcatcaggattgttggaggtgaccataggctgagggtatgatactttgttgttccttattcggttttatttttctataattagattttgaaaaccaaatattgctcttttctacgaggtcacaatattgtatttgtatatataaaatgtgagtgttgagttattaactgaaagcattcttatctgtacaaacggaaaacaaattgtaatctaataatactactgccttttggaaagcctatcatgagagctaaatattaatggttaaatttggggtgataggaaacgaagcacgtttgaagatattgtttaggttgtgttttagaactttgacaaggatacttcctcttttgttttcttgttaaagtttgttttccagaagaatgtaggagtactgcatatgttagaaatttgttacaaacaataatctgaaatttgttagaaatgttggagatggatcaaagtatcacttgcctgcatatgttattaaattggtataatttttggggattttacttcttttttttataattacatttgacttttctattaaaaaatatttgacttttctattaaaaaagtctttgatcagctctccccatcatgtattttatttagaaaatagtagtagtttgaaaggattgtgcattgcagtctactctttgttgttggtatttactctgtttagtctataatttgtaatgtcttgcaaccttggtttctcagtttaatttgcgtaatgattaccttatttttcaacttcttacaattgtctcttgattttcccaaatatatcattaattggaggattatttatttatttatcaaatcttgcaaatttatggataaaacatagatacagtaccataagtaccgttgctagtgttctttaattaaaatcaacatttgattgtggttagtgtggctgattttaatcattgagatgaaaacaaggattaccaagatcaaatgctgattttaattaagtttgttgattcatttcctatgttgttatgttgtcactaagagatgtatttttgctagctctatcaccaggtttaatactcaatcatgttgtggaatttgcagaactattcttccataatcaccgtccatccagaggtcatcgatgggagacccggtacaatggtgatcgaatcatttgtggtggatgtgcctgatgggaacaccagggatgaaacttgttactttgtggaggctttgatcaggtgtaacctaagctctttagctgatgtctcagagaggatggccgtgcaaggtcgaaccaatcctatcaaccattaagcatgtctaggggagaatgaagttgggttcatacaaattatatgatccattgctctctgatcctagctcaagtgtggacattggttggagtattccttctatgttcccagaagttttggaacttttttcatctgtatcatggatacattccccctaccatccttcttgcatttttagctgtgtaatcactcttttgaactgctaagtgtctcttcttcaatatttgtaagatgagattcagtgcctcatgaaagcacaaggatgtgagggggaagtttttacctgctatattcttcctggattttgtggatggtggtgtgttactatagttatttgtaaatatttttgttggaccaaagacagtttcttcagttttcatgtttcatgtttagtagcaactttttgccagatttatgtgctggcacaaggaaactccaaatagtggatactgccttgttattttctttaataagtagtgtagcttttgtaagaagttatctattccatattctccttgtttaggactatgttcagaacacttaatcaaaatgattttgtttctggctctcggttggtgtcatgcaccttgctgtgtggaatttcagagttactctttcttcatgcaccttactttgaggaactccaaagatacatagtttcttcttccaagtattgcaagcgcttccaaattcagtttttttttgtcgttttgttgggaagataaaaggcttaattgtatttttttacttctaacttttaaatttttggtgaattttatttcaatttttttaactttgcacaatttattttcaatttttaagaaaatttactttttaatacaaataaaaatcgagggcaaaatttgtgggaaaaaaaataaaaagttgtataaattttgtgaaaaaataaaaatgatagtggtagaatttgtcaaaaatataaaaaaaagcagggagtaaaagtataatgaagttaggaataacagaagataaaacttataattttttaaaaagtttacatcaaattaatttaatgaagataaaatttatcaaaattaaaaataaaaagttataattaaaccaagataatatgctactcatacggaaaaaaaaagggtaaaagggtttaaagcaatcggtggatccttaatcctggtggcttctctaatctaaaattcaatcgtactgaaaagaaaagtttggagagttgtgccaatcagaaggattgaatttgcgagtgaagttttcatggtacttttttctctcatatatatatatatatatatatatatatatatatatatatatatatatatatatatatcactttcatggtgtccatacatgagataagattgcatttaataccgtgcagtttaaccggatcacgtttgtaagtgttgtgcctgaaccttgacgttgaggtaacaacacaaacaatcaatactctagaaggttcgtgagttcaagtagggagggggtggagataatt

SEQ ID NO: 272 - DNA, 7719 bp, Glycine max
  source 1..7719: mol_type = genomic DNA
tatatatgctgatcaaggtcttctgtgtttacacatgctttgaaagggtcctgttcattagagaagtaatgtatctatcgtaatgtttattgatacataatgtttattttagaactgagttataggtgaggggcataatctataaacaattatctttgtttcaaaactctatggcaagtggcatgatctatctataatgatgcttattttaaaatcctttgacagagaagattagcataatctatcgatgactatgtttgttttaaaactatgtgataaaatcaggaaatcgttgtggtttgagtgatagtaaactcaagtttaagtcttataaaagaaaaaaaaaagaaaaaatttacttaaataattagtcagacttttgacagaaattaattattaaaataactaataaatattttatactaaaaaactatacgatagaagaatggcataatctatcaatcaataacaaagtttataatctatcaatattaatgtatatttgaaaactgtaagatagaagagtggcattggactgagtcactttccaataccatgccagattttgtataaaatcaaaatctggctgaaattcatgaaagctgcattacacggttgatgtgtccttacattaccaataatgttgttctaaagcataacacaagctttatgtgttctgatctgcaccacacactgatccatcacatagcatcatagcttctcaataattcaattgcacgttcctggaaacctgtgatgtgaatctcaaccgcacattccctgctaccttatcaattcgtgcattcaactgaagcaatcaaccacacacgtcatgctacttatcatctttattaaccgttcatttccaagccagtttcactcaccccgctgaactcatcacttactggaagccttgttgtgagtaagagaaaaggcttcctgcaccgagcacaccaacttgatacctctgattctttctttgcttagaattccacagaatatggagactgttcttttcaatcactccccacctttggaattcaaggtgcgtagaaatagtgccaagtatatggttaaatcatcactaaaataatcttaataatgggacttgaaatttaattactgtatccctctctacctgtttatgtaattttgtggagtatgtaccctttattttatttttatttatttgatatcatgttcgacccccactttgatggtttgagaagatatctacaaaccacaatgtcatgagaggaattgacatgttatttattatattatatatctgtcaacattatatattatatattgcaactatttgatagttacccttaatagagagattaaacagactcactatacagctccaaaagatttgtattttgtttaataaacttagtaaagtaccatatgatcagcagttattagtaatttgggttagttattgtgctaatatgcatcttgcattttatggggaaagatagaggtaaggcttaagaatttgatatacctttatatggtgggttttttgtcataggcattggctttcattataatatgcattaattttaaaaaattactagtcattttgatgtttcttgttgaagaaaccacatattttcccgatttctggtggatttagtatagttggtcattggcatattctttctgtttctttaaatttgtgacaatttgcatgcattgttacatacaaaagtcgttttaggttctttacattttagtcagtgtttaattgattaatttcttagcatattattcaaactttgttaattaattagtgatcttaagtttgaatatatgaggtttgttactcttgattctagttttggttttgtggctactggaccggtaccatgccttccccagtttgggttctatacttctctccttaagcagcaatgcatgagagaataaggactctgagaaactgatcttctggaaatggaaaaaattttgaactgtgattgcaatcagtagagggaaccattgagcttacatttgctgattatgtatggtggtgattgcaaaaatttatttaatgtaggggaatatttggtgttaagcattgattttagatgtttagattatgtatttaagagaagggggaaaaccaaacaagtagtattgtgaatgttgacaactgtgtaacgactgctagtgaaatcttatttgtgtgatcgatagaattaatttattctatttttaaaataatttattatgaaaaatttgtcgggataatttttataatgaaaaaggtgatttttccttaaaagagaacctggagctgtttaaaaaaaaactcaagacaaatgttatatttaaaagacatgcttaataatatttataataatcatgtcatttttatatttataataatcatgtcatttttcagagaaaatctctcttttagttttttattttattttaaaaagtaaattttgtaaacaatttgaaaaaaaaaatagttattacagattcgtttttcaaacttacacaaatagatcctcaaagcataaaggaacatataaatcaacaaacactcacaatgtttttgcaaaaaagtgatattattggtgaacctgtggcaataacttttcacatattgattattttgagaaagcaaaattttgaccatgaaattgtgattttttatgcatatatgcgaccaaattaccttttcatggttactagaaacccgctcacgggaatgcatgagaaactgaagaaccgattaaaatatgttgttttcttaataactataatgaagtttgaatttaaagttttatacaaactgttcaaattgtatattattagacaggttaagacttttatttattttcttcaaaatatttaatttcaagagcctcaagtagtacgtctcaacaatcaaattaaaaaaaaaaacttaatgtttcaataatattttattttatacaaactatgatgtatacagtatacaataaatacaacacccctaaaatagtgttattaacaattaactatgattctgtaaaaaaaattaactatgatttattacataatactataataaggtcgagtataaaatataatttaaatgagaaaaaattgataagttattcgtttgttttttttttgtaccaaagttattcgtttcttatttctccaaagaaactctattaacaacaaaaaataatcagtaacaatgagttatacatagattaatatgcactttttgctttctagtttcaaataagttttgaagtttctcaagacttgattttgtgggatctgcccctaatttttttatgaatttttttttttttcatttttattccactaagctatcatatttaactatttaatagactttatccctttgaaccatattttttaacatttcctgtttcatcgaatttatagaaacattttttttcaccaataaatgagtagtaaaacttataaattttttcccatttttcatgaatgctatgtaaaagcttcatgtttggttcaaaatgaagcgaagccgaaggttatacggatggaaatatcatcagatcccccaaacacaactttgtaatatattgcctgaatgcctgggtagtgtactactggaattggatagaatagtttgttttgtagtactacatcggaattagcttttaacaagtactcatgtggttctttgcttttaactagttatgctttcttggtaatttaccgtcagaagttattttggaacaaaagaaaaatttgcttaaacatacaacgttttcatttttcttttcccctcacaatatgtttactgtttagagtggtgtgatgtgataatcctagacataaaattatcgagggatgcattatcgtcgtatacaacaaatattgtgttttagaatttgttttctagaaaataaaattacgcccaggattgtcagttttgctaacaccagaaaattaatctgaatggtaaaaacagatgttttacatagacaaactgcctcatttgtttaaagatgaattatgactcatttaatttgtctcatttatttaaaatgctcgtgcttacatgtacagacactattaaatgttatttcacctatattgtataatattggtttgaatactaagattatttttattattttttacataagatttcaaatacgagtttcatagacaaggaaaataggtgttaaaaaagaaacttgtcattttaaataagtagtactctcaattataaaaaattgtaatagtattaagccgtacgtagtacaatgaattttactgattcgcggagccatgttaatggcacactaaagtttcccccatggcagtacgtggcacagcatatgccatccctgggtagcatattatgttaaaattgcttttttaaagttttaacaaattgacccattataacatcctagtgtacacataaacatgaaaaggaagggaggagttattacaaatttttaataataataacattattgatagatcagcaaaagaacaaaaaatattggcatccaatttctaacaatttcatagacaataaaagataaatataaaaattgacggacattgcatgaaattgttctctctcaatttgcagacataaaaatgctaacgcatatctattagttcactatacacaaatttcacgctgctgcatgcgtctctattcgacgtacaatttgtacatttgggctcatgccatgcacataataccattaaaacctttttcttatgtaaactgaacattatgagctagactagctaagttttatactgtgagtcaataaaaaataataataataacttttaaaatagttatcttacttaacgaattatctttacaatcgtttcataactatttacttttatatattctcacatctttgtgacttatatatttgtaatcagggtttgagcaaggaggaggaagactcattgctagggcaagtggaaatatggaggtacatgacatgcttcacggactccgtggccttgaaagctgtcatagagcttcgtatagcggacatactagaccgttatggtaaaccactatccttgtcgcaaattgtggagaacatagaagacgcaccctccccagatgcctctcttctccagagagtcctgagagtgatggtgcgcagaaagatcttcagtgcacaagaatcagagacaggagaaaccctcttcggcttgacacgagcctcgaagtggatccttcgcgacacgaaaatgaccctagcacccatgttgctgctggagaaccacccaattcacctgaaccctgcgcactacatcagtgagattattagagaaggcacaaaaaatggcactgctttctttaagtgccatggacatgagcaatttgagatgacgggtttggatcctgagtataataggttgttcaatgagggcatggtgtgcactgctagggttgtgtccaaggctgtgatcactggctacaaagatgggttcaaccagattaagtccttggttgatgttggaggtggcattggagggtctctttcggagattgttagggcttatcctcatatcaatgccatcaactttgacttgcctcatgtggttgccactgctcctaagttcgatgggatcacccatgttggaggtgacatgttcgtgtccattcctagtgctgatgctatttacatgaaggtatatcaaaaactgatcaataccatatcttcttaaaatgcatgtgctaatggcttataacactctaacacactacttttgcaaaagtgatattcgtacactcataatattagctagttaacatttagtgagtgagagagaaaaataataaaaaatatataaatataacaagtgatatcatgtaattataaaatgagaaaaacaatgcatattaatttagtattttaaaaaataattctagttttcatacataaacataattaaatttaatgtaatgaaattttatatcgttgtattactagtttgaactagtttgagttataatgagtcataaatgcataattatgtacatcttttaaaaaaattgaaagaaaggtataaataactattacccaaggtaatccaaatggttaatataatgatgtaagattttattgtatatatatataagtaatatatttaataaaagaatttgtatttgattttgatcatgtataaagaaattttatatcaacaaaaattatatattataaataaaattagtctctaatccgataactaataacacagacataaaaaaaaaaactaaccactgtgttgaatttaaatcctgttatatgataatatatagttttttatggtatatggtcaagtctttcattacaagtcaagtattttgtgcacttacccttcaaatttttttctttggggtgaaatatatgcagtggattctgcatgactggagcgacgagcactgcatcaagatcttgaagaactgcaggaaggcaataccagagaagacaggaaaagtcataatcgtggatcacgttcttcgacccgaaggcaacgaactcttcacagacgttggcatcgcattcgacatgatgcttctcgctcacaacgccggtggcaaagagaggaccgaagagaactggaagtggctgttcaaggaaaccggtttcgcgcgttacaacatcatcaagatcaacgctctcccttccatcattgaggcgtttccaatctgaagaagatgccactaccacaactgcatgtggtttttatgttgcatgtgttgttgttattattaacagctatatgatcttcgttttaattttgtggttttccttcctgcccttgttatgtttgtgcattaaataaaagtaagaaatgccccaccactaagtaatgctatatggattatgtatgtgttccatatatgtcaagtgagtggtgtgtggttgtgaagaatctattgcttttaatgaatcagatcctttggtgtgaaaaccttgctttctatgttgttgcctctcctcactccataatactttgctcaagttcagaaaacttccacagttcataagttttcagtatttatctgttaatttgttaaataaaataatgtttgattcctacaaataaaaaaaaaaagtggatgtatagaccacataagtcaatatatatgttatctattcccacatatccatcatcagttcatcacataagaaaatgaatagaccacaaaacaccggaaaactttggagtgccgggattttcttttataagaaaaaatttaggaggtgggaatgggtgacccattcaagacaggaaaaggctacatgcttaaagagagagagataccggcatttacctaattgcaaggagatgaatgagggttcgatcttataatctgttagatgttaaaccttgttcccttcaacttttgggttggagtgtcgattttaatggcttattcttcaagacttgaatagatataatttcaagatgagaattaccctacttatatactctttaatttcaggctctttctctctataatagatgtaccacttggaaattttccctatagaatagaagtataaaacagagagatatgtaagttgtatggctatttagtttagttgctgtggcaaggcctgtgtcacttgtgaatcatctttgcctatttatagccattgcccattggttatacacgagggggtgattgcttctattatgttctag

SEQ ID NO: 273 - DNA, 3481 bp, Glycine max
  source 1..3481: mol_type = genomic DNA
tttcttctcatgtatatgtatacgaaggatcttgagggaggagggggcgggagcaaggcccctaggaatttttttctaaaagtaaaaaatatttaacaaaattacatattaaggtttaaattcagaaccactaactaattgaaacaattatgcatcatcagtactgtattcatacgtttagtggtggaaaaaaatctaataatatttaacggttttattagaactaattctcagggttgatgttaaggatataagaaaggagtattttgattaaaaaggaagtatttatcatacaaaaattattcatttatttttaataaaaaatacttccacttttatactaacataagttgatgttaattaaattgaatattttcgtacaaaaaaaaaagatttttttgacacaaccaacgttttgcaaaatcgcgtagaatgtgtcaaaatatagtaataaatagaaattatggtcgcaataaagttgggcagatacaagacccctccgttttttttttccagaatgctgaccaaaagtcgccgcaaacccactgtgtatttgactctgtgtggtcaaatcaaaggagtatatattaaggtgcacttgtcctataaacgtgttaagaagtcaaagagtcaacgcttaacctcagatcaaagtttaaaagacaggaaaagctaaggaataaaaactagtttaatatctaataatcgattaacaagtcatagttgcagaactatttggcagcccaccaaaattgttttggtatagaaaattacttctacccaaaagtgcaaatcctcctaaatccaacgacggatgagtttgatcctcaaatctatttatataatcaccttcattagtatgatcttacttataacagaattagccaaaccatatctcaaccaaaactattacctctctctcttttctctctaacaaacactccataaacggaaaagaaaagccacacaacaattaattaagttgttaaatttttgtgagatggagaggagtttatcaggaagtagtgaagaggagatgtcaataacgaaaggtccatggacagaggaagaggattctgttctcttcaattacatcactgtccatggggaaggtcactggaactctgtcgctcgctacacaggcaagcaaaacaacatatatttatatttatgtgtttatatatatatatatagctgattaaattaagtcttatgattatcttaatcctagttactcacactgatcacgttttcaactacaggtctaaaacgaacaggcaaaagctgcagattaagatggttaaactacttgcgtccaaatgttcgacgtgggaacataaccctcgaagaacagctcttgattcttgacctccattcccgttggggcaacaggtattatcatttatgtttattattcattaaattttttaggttaaaatattccttggttcatgtaatttttcttatttttagtctcttgtacaagaaaattgtaaattttaatcccttcacatgcatccatgtttgctaaagttttggttcgcgtcactactaacatatatggaagactttttaggttttagtagtataaagcagccacaaacactttctccaattaatataagccgctaaaaaaatgttgtacatacattaaaactgaaaaatgtttgagaaacactcaatataccatcatatacttaatgagaaaaatatagataggaggtaaataaaatctgattaataattatttttatcaagaagcaaactcaaatattattcaaatgattcaaccttaatttcaacagcacatgaattacttatgctgaatcccctaattaggtggtgatttcctgcacagaactgaaacttaagatgaagcaagcaaatagcagtttgaccaatttttaatctgttagtgatagaacttggtaattgaagtgatgttgtgttatttgttttataaaatgaaggtggtcgaaaatagctgaacatttaccaggaagaacagacaacgagataaagaactattggagaacgagagtggtaaagcaggctaagcaactaaagtgtgaggtgaacagcaagcaattcagggacacgttgcgttttgtgtggatgccacgtatgttagagcggatccaagctcaggcctcatcatcatcatcatcatcatcaggccaagcccaccaaaccacgttaatctccaacgctcaagcacacagtgacccttgcggagtcatgacgaccaacccaagtttgttgtcggaggtgtcatcatcagcccttgatgcccacgcgccttctctctatgactctagtgcgtcttacaatctaatgggtggtggtagttcctcatcgtatagtgcagaatattgctactactcggacatagcaggaaatggttttggtggttcggacttgtggacggatgaaaatatttgctttctgcaacagctgctcgctgatcatgacttgtcgtgaaacatgcatctttgttttaaacttaggtgaaattaatttgcatctatcaagtatcaacgtaactattattatgtatacttcaattaatttcaagagaactgctatttgttgtaaatttaatttagcctgatttctaagagataatgatgagtattttaatttcccagaagacgattttgttcacaacaaatagaattaataatagagtaataaaatgtgattcgaaaaaatcatacaaatgcatgagtgtaagtttttgacagaaataacatgtgatgagttgtatttggctggaaaaaaacagcttataaatataaaaaaaaaattatcaatgaaaatcgatttatctctgttgcagtttcatgctcgtgtagtttagcatttttcctaatttttatcataaattttacgctacaaaatgtgaaagagagagatgagttcatgattctagaagaatgctaatggagcctactacacgatatataagttttgctaattctgagagatgaaaagttgggtttgattattattgcgaatggaaaattaatctggaaactagttttctgggagtggcttgcaagtcacggtcttttacacttgtgttatctagaagagaagaacgaaaacgtgacagaggtttgacattaatgaattaagactaggagatattcagtataatatgattcaaattggatgactttgttgttggagctgaggcactaacagcagcaacctttgaaactaaaactttttagttcttcgttttgagatgttcacatgtaactggacagtcaactttcttttatttttctgtcccatgcatggtcacagcacagctgacccaaaatcccgattaatagtaattgctgcagatcttacaaataggcccagatctacacactctaatctatttggtccaactcaaggtcgtacaccaaggaacataacaccgttaatcgtcataaaacctgttgttaattgttaagtaagttgcatcttt

SEQ ID NO: 274 - DNA, 5713 bp, Glycine max
  source 1..5713: mol_type = genomic DNA
tcgtacgacatcataaataagtattcgtccaagggtaactttaggagttgtgaatattttatattttatatttttctaatattgtgtggtatgatgataaataattttgttttttatgtatgtaaatgaaggttatttttcaggtagggccgtgtaaaaattgattttttttaaaaaaatcaatattgatgcatattggattcactttagacagctggttaatcgaatatctttataaggtgaattgatttttttaaaacagtttttttacaggttttattggtttcaatcatttttggatcggttggtttggctctattttttttttttacatccctaattccaggtatgtgtatttgactttcttgtatttgtaaactgtattttgcgtcactgcatttttagcatgtgttatataatatttatagtttttcctgctttcccttttagcttttatgtctcataaaaaaattattattatctaataattattaaattttaatgtctatgtactaatgtagaacaatttaacactatcattcaattacaaatcaatgtgtgaaataactttttttttctcttattttaaaagtcaagtcaacataaatttatcatacatgataataggttataattggataactatgtagaattatctttgcataacattttttctccaattattactatttttttatagtatggttgaaggaaaaaaatataaaggaacaaaataattacaggggaagagatgagaattaaaaaattatttttctttcccaaaacttaagtattatatttgtcataatttttaatctattgacaattaataacataaaacttttctactaacatgcataaaaaaataattttttttaaaaaaaacattggacatttggaattttagactgttctttgcagttaatctctctctagaaatttccagcaccatcataacacgttctctctctagaatcttctttcaggcaccaaccaactaccaacactaatctaagctcaaaacaaacacaacttcctaacgtagtcacagagtcaaaaacattgtttcacttaaacacattcgcacataaaaagaaaccattaacatttaaccatactactagattattaattactagtacttgtgttgttgtgtcactcaaactaaactaaactcaatttccaatttccttaatcttcttgtgttgatgtgcatggagagaatcagagtgaaggaggaagaagcaatgacatgtggaggtggtggttcatcatcttcaagctttatttctccacaggcacagcccatggaagggttgcacgaggtgggtccccctccgtttctgagcaagatctttgacatggtggaagatccttccacggattccattgtttcatggagcatggctcgcaacagctttgtcgtgtgggactctcacaagttttctgctcacattctgcctcgttacttcaagcacgccaatttctccagcttcattcgccagctcaacacctatgtaagtactcactgtgtgctctttgaaattttttgtatgtaactgttcatgatgcatggttttgtgtctgagttggtgtttaatgtgttttaaggattggttgctgttgtcactttatttatgggatttcatgtgaatgtgtttggataagcaggcgattgtaaaattcaatttggttagagttatttttaaaataatatgattattgtttgaatctttacattattaaaggcaacttgacaagttaactgataattgattatgaagtaacatgatttatgtttgaatcatttcattattaaagacaagttacaagtaaaattcggggtaaacttaaaattgatagcacatgaaagtattagtagagaatctaacataaaattaaacgcacattcattttaattgatttatagggtgtttggttctatctttcatatgttactgttcaccttttggatgtaattttagaagctaaccgttatagttttcacatcccaaacatgattaatttctctatttttaatgagtttttaaacacgcttttaatgttcagcttcctgtgtaatcttaggttgttgaatttttttatctgtttagggggatgacaatttttttttttggagatctaaggaaggggttataggtcttagaggagaatgtgtatttacttagtataattgaccttggatcttttgattcatttttattttctttttgatgagggaccttttgattcatggtagtcacttctcttctcttaccaaacttttgttggttagccttatatatacttcacacgtggctagcaattcacatgacattattgaatgatataagtcttgataaaaattaaagagcgccttggtaatcttttgttttgataacatctagggtaattcaaggatgacatatcatcctttgttctgatagcatctaggtttatgctatcagatcctttgtttgggtagcatctagggttggtgagacaaattttgataattgtgcaatctctgtcccttgtgcatgcggatgacatatcatttaattttaaattgtcaatagggtatcctcaagtagttaatttgtttgtgaacaatatcacgtaaagactttttaccaatgatttgctcaaaaaatatattccgactcctaatttcttgtaataaaatgagatgaccatataatcttaataaaatactactagttaattatataggctccatcaaaattcaaaatcattccatgttcttaaggatttgcttatgccatcattttgtttgattttttctttgattaatcttaatttttcagcccccatttcaattcttatatgagggtgtttgggagaagtaactacttcgaggaaagctctcttagattgtaaaaataagtcgttacttttctaaaataagtagataagatgaatgaaatacacttacatttgaatgatttttcataatctggcctgctgtatgaaatttcgaagaagacaaagattatcaaatatctatgagtttcttcaattttgttttcaaatcataaatattctttaaatgggtcttcaatgtatgagtagatccaaaattgacattgaagcactagtttgatgtaaaaaaattaatattggaagtttattttcatgtatttgataatcaaaattgagtttcatgttttaagattattatttttttcttctgtattctagaaacataagaattaatatggatgattaattagtacaaaagtatctgtttttttactagttagttggacgtgactttgtagaggtgatcacttaccgaatgctttacactgattaattagtgcttacttaaatcattgaccagcttcctcgaactaatttgactaatctttgtcttcccattttgttgtgtggaaaatgtacacaggggtttaggaaagttgatcctgataaatgggaatttgcaaacgaaggttttctggcaggacaaaggcacttattgaagaccataaagagaagaagaaatgtgtcacacagcaatcaacaaaaaggaggaagtggagcttgtgttgaagtggggaagtttggactagaaggtgagttggagaggttgaaaagggatagaaacattttgatggcagaaattgtgagattgaggcaccaacaactgaactcaagggaccaattaagtgccatggaggcaagaatgcaagccacagagaagaaacagcaacaaatgatgagtttcttagcaaaagcactaagcaatccatctttcatgcagcaattagtccacaaaaccccccaaagcagagaagtgttgttgggtgttgaaatcaataggaaaaggagactacctgcttgtccaagtgtggagaacttgcaacaagataatcaagatttggcaactatggagactgatatggacacttttttcgcaccggcttatgataatgaattcggtaatgaaatcgatgagcctgcatcgattttggttgaggattcaatcttggaggactttctcaacaaagacttgattactgggaatccggaggatgaagttataattggtgattgcacccaagtcgatgtgccgatggaggatttggtagcaaaccctgatgattggagtgagcaattgcaggaccttgtggatcatatggactacctaggatccaaaccatagagggatgagaattatactattattgtgtcctcagcttggtctctttaatttcattcacattgcatcatgatggtacaatttggtacttttgttactacttttggttttggtttcaattttatgtgatcttaatgataagtgtgaattgtttttatgcagcagggaaggtggtagatacagaagaagcaaacaaatactgctcttgtttggatcctttatgaagttttatgaatattacttgtgctaatgctacagatcattttattaattatttggatgacctatttgtttgcattttatgttatgcaggagagacaagtgggggcacttcatggttgtgatccaaataattgctgagaaattgtaatggtatcattctgcttcataggatatcattggctggatttcattgttcaggagaggatataaaaactatcatctagttcttctagtacgaatagcctttcagaggaaccacatttgttcccattctttttccttcaaaaaattggatattgttggtgctatgcatggttctttttctattaataagtgaataattgaataaaatttgtctttgtttagcatcttaatatttattctttcaagattagaaattagatgcattgtcgtgtacgaaatacttatcttacatgttagaaaaaaagctttgtagtttgtttttcaaaatgaggtgggggaagttatatatggtttttaagacaacctaataggtgcattaaaaaaaaagaagacaatctagtaggtcatgtatagctacggcaaagtgtaacgatgagtaattttgttgagagttgaacacgcaaaaagaacaattttcgtaggttggatgactaatgttgtatgctagttgtagtgttgtattgaatactttaataaatgaagttataaattactataaatatctataatctatagaatatttcgaatgaaatttttttaagtgagttgagtttcttaaattatttttttagtctctatagtattttttgtggtgttcatagtgttatgttattataaaaaatttatacctaattttactctaatgataagaaacttcaagaaatttacttttatatttttttatttttatttaattatgatttatgtatggtattgttatgcgtcagataaatatttttttattattaagaaataatttatcacagaaaatacaaattttatttgtaagaaactctttctgccacatagatttgctctaatagacaaggagttgtaagaaatattttcttcacttaagaaactcctcaataaacctccattggaggcagtcaacaaattataaacatgcatattcgtacaaatttgaggtgtttgtttcacttataacttttttagttttgaaaatattatttttgagaataaaatatatacacgttattcttgggaatttaataaaaaaatgtgtttgattaattataacattagttgagaatgttttttatattctcgaaaataattaagacatatgtttggttaaattat

SEQ ID NO: 275 - DNA, 2153 bp, Glycine max
  source 1..2153: mol_type = genomic DNA
tgataatcaaacttaagaatagtccaaaaggagcaaattggggggatcaatcaaaagaaggaaaccctagggaaggagaaaagggcacactttggctgggcctgtcaatttccggcccccactttgaaaaggcttgtagaggacgcaaaaacttcctccaatcccaaacgccacctcgttcctctactgggtaagttttcattttccaaattcactcattctacctattattccgcttccatctctttgaacatggaccgggtcagataggtttaaagtttttggtaaatttggtgcctaagattacgatgggtaactgttctacgtgttacatgctctctctctctctctcactgacacatcttaagcaccaaccaatctccttccttatttattacttataagcatacacgcacgcacactcactctctcatctctacttgaccactctctctatatatacaccactaaaccctttcttcgttctcagttatcttctttcacttcacttaacctagcctccttcccattctgatttgagttcttgctttgcctcttaattttatttttcctcttagctttcttcgatcttaacctttgaacagtaattgcttgctttgtatacattaattactataggtggtactttggcagcttttctattgtatagagacttatcagtgaataatactactatgtgggtcttgtgtttgttttgttggcctacatatacacatgggagttgaggagccttttaggccttagccttacattagttgtccctctttccttgcctttacttttgcttcatatattggatttgattagatttagggttagggttagggctgttctattctcctcctcctccttttctacttcctgatatgcttcaattcctcctctctctctctctctcttgaagttttatgttttatggccaagtgatcttaatggtggtaacacagagagacctaatgaagtcctaaataaactaaagaaatcagtcactgtttgccggtggagcatcatcaagattcacaagctttaggggcattaatttgtttgaggtggttccttattgctccaaaaccaattagcccttttgctatgggaatcttgatgatgctgcagcagcaataaatgactaatactactaccagatattgcttgaggaggatctcactactacacaactgtgctacaaggccaggagcaaaggaggttatttaattaactaaataattatgttattaatttgttttctaaatattcaagaaattggattaggtaattaccaagttacaagccacttttggatttacctttattaactctagtagctgataaatcatatatatcttcaacatggatgtggttgagtactacttcagggtccttgtggaaattttcaatcaagtgcaggtgaaccacgcgttgaatgagacatcatagataatgatgccattaattggcctgtgtggtattgcactttcttgtgccattttgaggtttaatattcagtaacgatggagcttagtgctcttagtacctttatggaatttgcagtactgcaaaaccccttctcatctgcaaagctcagtaggtatgtctgtacgttgatggaacattgtgtactacaatggatcattgaatgccttttacttcatggacattcggggtcactgtagtatttatcttttctactcttctgttatattatatactcatattattaatcccgttaaaaagtattttttgtatattcattttaatcttgtgtgtctatatatatatatatgtgtgtcccttaatttcagttttggcatgagcagcagctttttacttttacacgatgtgtgtggatttttgtttattttttttgaaggggatgtgttaggaatatcaatattaatattatacacatatttgcactttcagtactgctcttaatattgtcaaggaaaaatgtagattagttactcctcagatttatacctctcttttaactggatatggtgctgtttttactttcttcataaagtagcatataaccagctttatgtgtgaatttggctcttttttcttattgatattgaaatgctgcaagatttatttctctgttttttagaacaaattgtatgtaaatatat

SEQ ID NO: 276 - DNA, 6633 bp, Glycine max
  source 1..6633: mol_type = genomic DNA
atttttaaagaaaaataaaataaaagtgaaaatacattttcttaaaatttagaaaatatacataaaaacagatcaatagtaaagcaacgttttcaatcttttcttaagaagtaaaaatacggtgacactttgacattttttctcaatatattttttaaatcttaaaaatttaaaataaaaaatatttttaaaaaataaaaataaaaataaaaaataaacactcaaactaaaataagtaaaagttttaattttcacaatgtggcgcattaagactctcgaaatgctatttccaaaaagaatggtagctgactagatgcaatctctcgtaggcgttaggttggcaatggaaggtttggttgcacgcttgcacgccccatgtcagctgataacctactttcttagagtaacccactttccatattcacaaatgattaatggtcaatcttctaattcacgcactactcaccccaaccatccattaggatattccgagtctaatggctccattattaaaaaaaaaaaatctttttatttaaattttaacttttcatttttatatatttattcttaaacgaaaaatctaaactactatatttgattcatattctttatttattttttaaaatttccccattgtttaaattttttaaatcaaaatcaaaatcatttaagtttacttaattttaatattgtatgaaataattaaaattaaaaaaaaatgtttttttaacaaagtaaaaagaaattataatggtgatagaaccacgggaaagtatttgtgcaaaataattgaaattacaagtattattttctattacaatttttttaattgtttctttgcttttttttttttttaacttctattttgcaagcatgtattttatatttaatgtgtgtggagggggacggagtacaaactcttttttgtctatattcagtaaaatgttggtggagacgtgccttgcgtgatgaactaccatttcaaacaccacacgacaccacacatccattttaaatataaccccatcatagatatcccgaatcatcaaattattacttcatagcaactagcaaattaattagcttcaccatggactcattgttacttctaaaagaaattgccacttccattttgatcttcttgatcactcgtctctccattcaaacattcctcaaaagctatcgccagaaactcccaccggggccaaaagggtggccagttgtgggtgcactccctctcatgggaagcatgcctcatgtcaccttagcaaagatggcaaaaaaatatggacctataatgtacctcaaaatgggcactaacaacatggttgtggcctctactccagctgctgctcgtgccttcctcaaaacccttgatcaaaacttttcaaaccggccctccaatgctggtgcaacccatttggcttatgatgcacgggtaggaatgcagcaccttcatatttttatttattttaaacacaccattaatgtcacttattatatataactatactttctttttgtttttctctctcactaagtgctaaatagaaataaattaacttatgaagaggttagattcggagaattcttataaattaactttacataaattaattttaatttataggagaaatttatttattttcttatttttttctcctataagtatttattataattttattcaaattagcgcgtgtaaaaaaaaataaatgaactgatccaaaattgaacaaaactctgcttcgaaaaccgaacctttttaataagaacggttaggttttagagtggttcaacttgtttctattcaattatttaattagaaaaacctatccatatacagtatagaatgaataattgacactaatggaaccaaaccgaagctaataaaatgtaaaccattttgaaaaaaatttaactaactcactttataaaaaaaaaaattgattaaccaaactgtttttatgaggtgatttgtaaatggaccggtttggatttaaatacaaaccaaatgtttcagggtcttaatccaaaaatgagattcttaaaataagtgaattcttctcttcctctatctatatgtaataatttttctaatatattaaaatacgtagctttataatttactaagataataacatatgtatatcttttcacttttggctattttggatccgtccttgttgacaggatatggtgtttgctcattacggatcacggtggaagttgctaagaaaactaagtaacttgcacatgcttggaggaaaggcacttgatgattgggcccaaattcgagatgaagagatggggcacatgcttggtgcaatgtacgattgtaacaagagggatgaggctgtggtggtggcggagatgttgacatattcaatggccaacatgattggccaagttatattgagtcgtcgagtgtttgagacaaagggttcggagtctaacgagttcaaggacatggtggttgagctcatgaccgttgctggttacttcaacattggtgacttcataccctttttggccaagttggacttgcaaggcatagagcgtggcatgaagaagttgcacaagaagtttgatgcgttgttaacgagcatgattgaggagcatgttgcttctagtcacaagagaaagggcaagcccgatttcttagacatggtaatggctcatcatagtgagaactccgatggggaggaactatcgctcaccaacatcaaggcactactcttggtataacgctttttatcttacttctcaaatgtgtcattttctttcttcatttttattagacaaaaaaaaaaaagtaaaatatttgttatatgaggataactaccatggaggatcacttatggtatccaacgttgttaaataaccgttataatccgccttaacgttataatgtggcatttttcaacccctctgcccatagacagtttgtgagggaggcccgttatgacggcgccatagggtgcaatggcttcctaatatggagaaattttagccttctgcatatgtcgtcatctgtcattgataactttggtgtggtgttaacaaaacaacttatatagttaggataggtagtaaaaagaaagtgttatttccatatttttcaaaccccttgttatatatatatatagtggcggacctacatgagtgataaaaaaatttattctcttcataaaaaagtgtaggagggtacttgtacctccttattttttaaaatttattaaatttataaataaaattttatatttttatattttattttatctatatttatataattgaattcattaattttattttttataatttaaactccctaatttaaaatcttggatccgcctatatatatatatcaatcgtttttttacattttcaagaattatattaaaaacttcaacatctttaattcaaaaatgctatacactttctaattcattcttttaaacactttctaattcatttttttaaatatattattattgactaaaattgattgtaaatcatacattggttctattttttttattgaatgagtctcacttgttctgtggtttctaacatattttaactaatatcaaagagtaggtacgttgagtgtattgttggttcaattcttttctttttataaaaaattttgatatcataatatttgaaagttttgtttaaaataatcttccctctatttgtacataattatagcatgtttgttttggcaaattgaataaaaagtgaaaaatttggaagcaatataaaacttcgttagaaccattaaaaaaacataatcaatttcccttcgccacccccacacacatacatagtaaatttagtcctacacatcataacttattttgcctgaaaaatgttgagttaatttttatgacttgaagtgacaaaaatacgttcaaaatttgtttatattgttcaaactataaatttacaattgaaccacaaagaaaaaggatttccgtatgacaaattaaaaattaattgcgatattgcatagttaactctactatatctgaatttttatttgttttacaagtacaacttgtttatgatataagtttagctataagccaagtaagtacactttaaatttagccaaaaaggaaatgggcagtctgtatcataaattttcttagacggaaatattaaagtacaagctacgaatatatcgtatatattgtgtgagatcaacttaaattaatcatgatggaggttaaatgctgcaattaaattaaattcagcgggcctctcccccaattatttataccaactttttgctgcatttggaattggggccacggaaagtaatgtcccaactaagaaaatatcttctcatcatttggtattgtacgtagtgaatcacattgactatatatcatgtattaaatctgatatgagaatatttattttccatcttattttctatatgcataataatattagtttttgtctagtatatatatcacatttttaatacataaataacaaatttagtcaacactttttttttaaaaaaaaaaagacctaaaattttgtttacactagaaactaaatattaattgttgtgactaaattacaatgtgaatataataataccatcataatagtgttcaattttaacaaaaaaatctatgttatatatagtgcaaattcaacgaatcaatacaaatcatattttatataaaaatttattgatgatgtaaatgttagtgcaagttattacgatgataatttaatccctcgcctcataatcataccacacaccaacattttctagcttgagattttgttctaacaactatatatgctattttgttccagaacctattcaccgcaggcaccgatacatcttcaagtataatagagtggtccttagccgagatgttgaagaagcccagcataatgaagaaggctcatgaagaaatggaccaagtcataggaagggatcgccgtctcaaagaatctgacataccaaagcttccctacttccaagccatttgcaaagagacctatagaaagcacccttcaacacccctaaacctgcctcgaatctcatctgaaccgtgccaagtgaatggttactacattcccgagaacactaggctgaatgtgaacatttgggccataggaagagaccctgatgtgtggaacaatcctttggagtttatgcccgagaggtttttgagtgggaagaatgccaaaattgacccacgtgggaatgattttgagcttattccatttggtgctgggaggaggatttgtgcagggactaggattttgagcttattccatttggttcactacattttgggcttattccatttttgagcttattccatttggttcactacattttgggcactttggtgcattcgtttgattggaagctacccaatggggtgagggagttagacatggaggagtcctttgggcttgccttgcaaaaaaaggttccacttgctgctttggttacccctaggttgaacccaagtgcttacatttcttagaattggttgggttcgaatattcaccagctatgttctctagccttattttgttgtccaatgattttgtggctgtggctacataaataagtaatgtttgggttgcacaacctatttgtatttgtaaggttctatgttacttggaaatccgttaccccaccacctgcaaggcttagatttttattcttcatggatctctaatttagctgtcttgttttggtttaattatatttttaattctcactcatattttaatttgtgggaaattttatagtattttaaattttaattctttattctttatttttataaaatgtaattttaatttttctatttttattcatcctcaattttgatcctctcattaaaaattgagatatgtaattcctctaatttataaaattcataattttgacctttcaatccaaaccaatgtgttgacggttaaagttaacattgatctgttgatagctgtattttttttaatgaattgaaatgtgtgtaattaaaaaaagttatctttcaatggtgattaaacactcaatttttttgtatgaaaacactggtggctttcttcatgtttctttggttctagatctgttatctcttttgttaattggcttttttcttctcaaattaaattttaaaaaatatcacaaattaacaagcataagaaatgtttgagaaatgcattaaaatgaagttgatcgtccccggtaataattaggtgttcaatggcaagaaatggaattataagaattgggcactgaagctcaaaaaaaaaaaatgcttgtagcattatatataaacaatcacaattatagataattagctagttatttcatatgcgcacaaattttcaaatgaagaaaatgttttaacaaaacaatatagcagaacacacaaatgacgacgggtagctaatgatatttgaggctggttttggtttggcacttaaagtggaattaatgactgcaaattgtgaagtcaacgttgtagatgagggtcgagtttggattcgccgcttacgagattagttttccgtgtcttttttttttaaaaaaaaaaattaaatacatttcaattcattaaaaaataattataa

SEQ ID NO: 277 - DNA, 3451 bp, Glycine max
  source 1..3451: mol_type = genomic DNA
acatcgaattttaaattgcgggcaagatatcttgttaatttttggatatacgtataaggttatttgattcaacatccatccttaatatctggtcaaaattttggccatttcttttggcaacgtagtattgctcataacaaaatgagtttaattaaggggaggatcttttataagaaatactgcaagtgttactatgttagcctttggaaatcagagttctttgcaattaatttttaactgcaatgaattattaccactaattattttttgagaaaattaccactaattttgtatacattgtaaattcaaaaaaattgaatgctgaaagcataattgcacaatcttattaatatacggtagttactcgtttcggtctcgaatgtaaaaaacgaaattccttattttcttggtctaaaagtcaatcatcttattggaaggtaatgtaaaaaatttctacaatgcgatacattctaattaaattcttaagattataagatttttttcgttgtttattaagattgtaatattacacgcacagaatgattttattattttttagcatgtgccatttacgattgccataaatcagaaagacgaactcacgattcacgaagatgaaattgccgtgagtcgtgacgatgtgacgccctgcaccaggcaccagctgcctctactttgaaaccaaaaaacagttaacccctcaaaaaatgaactggcaaacccatgcactaatgtgactagggaattcatttactttaattaataatttagtcgtttataataaaatttacgtggtccatcctaaaaggtatcgaaaaggtgcttttcctttattttaaaactcacgcatgttggctcgccactttaccaaaatgtgatgttgcatccaattgtcaagtggctgtcattcacaacatgcataccctatttattaatcgttaattggaaaagccaaaacccactactatactgctttgcattgcatatctctctcacacttctctcccatattcaattaatcaatatggcttcatgttttccaaatgcatctccatttttggtcatgctcgcaatgtgcctcttaatttccacctctgaagctgaaaaatatgtggttggaggcagtgaaaaatcctggaagtttcctctctcaaaaccagattcactcagccattgggccaactctcaccgatttaaaatcggcgacactctcagtaattactctccatattatactcctttctttatttcctatacatatatgtctcatgtttggtgtttacttagtgttggaaataaatctatgtcctacgtcgtacgtcaaccaaaaatagtgatataaaagagcttataaaactaagatacattttcatatgattacttaaaatatattttgtaatcttgactattaaaatatgacggtgtatatttactgtcattttcatttttcacgttaactacgtattttcacgagttactcctcatacaatagaataatcttaatcatccattccattttgaggtaagctgggatggagggaggaagagagggattgagagaaaaagtagaaaaagaaagtaataaatataatattatgtgatttatatgatagaaaatgaagagcaataaaaaaaaaatatgaaagtgatcgagttgggagggaattagattaattaatgttgataatagtaagcatgcaagttatatatataaaatgtaccacatcttaatttttttgactagtattattaatctgttaaccgtatgatgagtttttatttctttgtggcattatgtatgcattttatgattgttaaaactcattttttgttgctgtttttgtatgttatacacagtatttaaatacgaaaagagaacagagtcagtgcacgaagtgaatgagacggattatgaagggtgcaacacggtggggaaataccacattgtgttcaacggtggcaacaccaaggtgatgcttaccaaacctggattcagacacttcattagtggaaatcagagtcattgccagatggggttaaagctggctgtgcttgtcatatcgtcgaacaaaaccaaaaagaatcttctttccccatctccttcgccttcaccgccaccatcatcgttgctatcaccatcaccttcgccacttccaaataatcaaggtgttactagtagttcaggtgcgggattcatcggggttatgatgtggttgatgttattgctttaaattgagagtattgtgtattcgcaattttgcatgttaatgcctccgtcactaatcactatatatgcaatatatatatttgtggttgtggggttagttattcaggtcaagcatgcattttcgctttcatttttgtaattttttttaaaagtttggacgttttcttttgattgcgcaattgtgcccttaaactcaatgcccgtcttggtaattttgagattgaataagtcatttggatttttatgcatgtgggtttgctgttcctacgtatgggtgtaaataaatcaggccggtctacagaggtctacgacttgacctacataaaatctgaccatttgattaaaaggttaggctcagacttatttaaaagtctattaaattaaatagaccaggtctaaacttattaaaaagccttataaatctgataggtcggcctatatatatatatatatatatatttatattatttttagataccaatatataatattattttttggatacaattaatttttttttgaaactatcagactttgattacacatggctgctataaccaagtaagactttaattacaatttaggtgtcactcatgtgtccttttatatttcttattatttttattgactttccttttcttttaactttcttattacattcctacttcataaaatattaaatatttatttgaaaaaggcttttaaaaaggttatcaggccacaccaagcttttaaaaaatgacagttcgaggcaaaataaaagtctttaatagactataggtcagacttaggtctttcaaagcctgacctgccttattctcatcccctatgtcattattgttgtcaaatgaaataagttcactgcttctcactattgtgtattttactattacgcatttaaaataatttccacttatgtgcatgttttttaccctgctaaatgcatttagacggatccaatgctttagtttattaatttgcccagaaattgtctttaagtatcaattgattacttattttattttattagtacaaagtgctaaaataatgtcacttggtgttcattatattattggatataaaatattaacattataaaattaatatataaaatttaaataatgaatattgaaacataatttaagctaattaaggaaaactttctttagttttcttagttaatacagtattttttaactttatagtttccgtaccttcaaatct

SEQ ID NO: 278 - DNA, 3908 bp, Glycine max
  source 1..3908: mol_type = genomic DNA
ttgagcagggacatatgtacattaacattctatttgattgtgagaaaagaaatagagtttttgaaaataacagaaataataagagaaacaaaatgaaaataaagttaaatgctaagtagttgggtcaagagaaataagtaaaaaataaaattaaaattatttggtttgaatgaaatgagaggagaaaatttaataaatgtatggaaattatgcttacatctttggcaaaattgggaatatgggtatgctttgttaccaaaagaaacccaacaaggatacgaaggtaaaaacatattgtgttcattatttactcatgcagagctgctctagacaagagagagtcatttaccaaaaaagaaaaacgataagagagagaaaatttatttgtaggaccctctaaaaaaaaattaccacctctcaaccaaatgtttgcataaaattttgtcgtggttctctaccaaaattactggcaccacacagacgctaaacattgtggggggcaaatatatatataaaatttgtctccaatatttaaaatacagtaaaaaaagttaatttagtataagtattgattctataacttaaaatttctaaatctttaacattatagttcactgtttccagccttgattgtgacaggatcctcctaataagatgaccaaagtacctaacagccaggtataaagaaaattaaaaaaaaaagaagataaaaactacctcctttttcaattatcatctagctgtcttatttaattacaacccttagcttattacaagggtattttggaaacatgccataagaatcaactgaccgtaactgaatctcaagtgaaacaaggttctaggagacgttggattcttaggaaaccatcaaactccaactcttcaccctaaagattgaattgacccaagtaaacatattttctcaccaactcctataaatatcctcacaaaacttcaacctttccttcatccaaagctactccaattcctttattgtttattgccacctttcgcttataagttactactttgaagatggccaaaggaaatagtcccctcgagaggcctagcttggcttcacttgaccaaaaattggccttcgctaagcgctgttctcatggtacatataagcttttacttccaatttttatcctaaaagagaatgtacattgtatagcaaattctgtgattccatttttcttttcttttactgagcagaaattatgttctcttgaaataattgtttggcaagaaacgccataactagaaacataatatagaatgagaaagcatttatagtgaatttggatatgatttctttaaaatcaacgtacaaatgtataaaatgagaaagtattaattcaaataaaatattctgtaattttaaagaataaaaagtgcatgtattaaggttttgtcagatacccacatcaaccaaattaagtatatagctaggtgaaggataacttctatcttgcaaaataatttttgttgagaacctcaaacccacacaagatagatattttattcttaatacgatttatttctttcataactaaagatcaattagaaattgaatcttgtattactccattaaaaaacacatactactatcatttctgtgaatagttgttagtcccgtccatgccttcgtctttattcattgatcgatatttcaactatttctgatatgatatggaccgctgaggagtgcatcaaaattaagatatataattgctgaaaacttttgccgatttcccaatctgatattattactaatttgatttgggtttgtttaccttttctaattttgtgtaaacagagggtgtgttagcgggagcaaaggcagcagttgttgccagtgttgcctctgccattccaactgtaagtatttctccaacctctatattcagttcattttcattcactcaatcctaaaagatcttcttaataagatcaatttacaaatttacatttaaaataacgaccaagtaggattattattctattcagagagaaatattaacatcacactcttacacattatttttattatcagtcaaatttattagaaattaaaaaaaatattagtcttatattttatttaacaaggcgcattagtgaacttttaatgtctaataaattttaactaataataaaaacataccagagaatatcttgataacaattctgattctactaaagattttttgctgaagagatttttattagaatagttatgcttggtgtgcagctggctagtgtaaggatgctgccttgggcaagagccaatctcaatcacacagctcaagctctcataatttccacaggtttgaaagcactgtgatctcttaataatttgctggaatatatgaaaatacataatttgttttagtttttattggaatttattcttttagtattctgcgtttaagtagaacagttcatttttattcgttcaccaaaaactaaaaaaaatgtttttttgtaaaacttttaagactaaaacaaaataaattttaagatttattttaaatactgaaaattatttccaccattcctaacttcacaatttgattgcagcgacggcagcagcatacttcatagtagctgacaagaccgttttagcaacagcaaggaaaaactccttcaaccaaccctccaattctgaagcatgaatccgaatggatagcatggacaatagtcgattataccacagtatccaaccgtgaatcggtgttatttatccaaataaataatgtgttcataagaatatttatgtacaaattatctgaattaatcatttatttcatttcagcattaatcatttacttcctaacagtgcactatcaaaacatggtacaaccaaaaatttgacaaacagtgcacccaatagggtgtttagaatccaaattaatccctaattcaatccgacccaattatattaacttgaatcttttaaatgtttggatcaaactttcaatttaattataccatagtatccaactgtaaatcgatgttatttatccaaataatgtgttcataagaatatttatgtacaaattatttgcactaatcatttatttcatttcagtactaatcatttacttcctaacagaatagatcaaaacatggcacaatcaagaatttgatgggataatttataaatttgtaacgttaaaatagcacaaaaatactgcatccaataggatgttcagaatccaaattaatccctaattcaatccgacccaattatattaacttgaatcttctaaatgtttgggtcaaactcaacccaatttaattatacgacaatatccaactgtgaatcggtgttatctatccaaataatgtgttcataagaatatttatgtataaattatctacactaatcatttatttcatttcagcactaatcatttactgcctaacagagcgcgaccaaaacatggcacaaccaagaatttgacgggataatttgtaaatttgtaatgttaaaatagcataaaaaatactgcacccaatagggtattcagaatccaaattaatccctaattcaatccgacccaactatattaacttaaatcttctaaatgtttgggtcaaactcgacataatttaattataccatagtatccaattgtgaatcggtgttatttatccaaataatgtgttcataagaatatttatgtacaaattatttgcactaatcatttatttcatttcagcactaatcatttacttccgaacagagcacgatcaaaacatggtacaaccaagaatttgatggaataatttgtaaatttgtaacgttaaaatagcacaaaaaatactacacccaatagggtattcagaatccaaattaatccctaattcaatccgacctaattatattaacttgaatc

SEQ ID NO: 279 - DNA, 5728 bp, Glycine max
  source 1..5728: mol_type = genomic DNA
aacttagtaatgtagggatcgaacataaccacttgcgatgaataatttgctttaaatttttgttgatgcgtaccctttaactgtcactcatggaatacgattcttcaatatctagtgcttgatcgttgacagaacaacttaaaacagagaattgatgttttggcttttccatggataataattatcccagtgacataccaaagcatagtagctaagaagactttcacgtaaaaaaaagtttcttttattcccttttttaatttggtgaatcacaaaaaaccacttttgtttggttccaaagttaggctcatggaaagtttaaacctccatagaatggtcacgaagagattgcatctttgtcttcacaaaagctaactccacgttgagtagacttaacagccagtggcgaatagcaaggatatttcattaattatacgccaccggccaaatgttaaccaatcgtattataattaagttccatcatcatcaaacaatttagtaaagtgcatgacccaaatttctacgatacatatttatttattaaaaatgtaagaatatttcagtcatatttaaaaatatatatatcaagaataattaactttgtacacacgcactgaataaaagatttgtgacagacaaggcttgcataaaaatttctcctctaaactaattgcttgtaggacctctcccaccactatagaatcaatataattaatccgcattagaaagttatattgtatacaattttcttgaaacataattatacttcatgtttcacagacttatagtggatcttgtgtggctagctactgatgaatattgttttttttttttcctaagcatccactttgaacaacttttcccatttcatacaaacagaattaattagtattgcgtgccaccatatggtacagtgttgtacatgcatataagctatttaatttaataatatacaaacataacggtgtatataaatagaggcagcatgtggtgtgtggtgtaaaaataaggacgcaggcaaatgtatgcatttggcataagtatataagagagagggagtagtactactgcaaagcaaaatcagagagacatgagaagctgtgtgtgctacacgctattattgtttattttcttcatatggctgcgcgtggcaacgtgctcttcgttcactgacatggaatcgcttctgaagctgaaggactccatgaaaggagataaagccaaagacgacgctctccatgactggaagtttttcccctcgctttctgcacactgtttcttttcaggcgtaaaatgcgaccgagaacttcgagtcgttgctatcaacgtctcgtttgttcctctcttcggtcaccttccgccggagatcggacaattggacaaactcgagaacctcaccgtctcgcagaacaacctcaccggcgtacttcccaaggagctcgccgccctcacttccctcaagcacctcaacatctctcacaacgtcttctccggccatttccccggccaaattatccttccgatgacgaaactggaggtcctcgacgtctacgacaacaacttcaccggaccgcttcccgtagagttggtgaaactggagaaattaaaatacctgaagctcgacggaaactatttctccggcagcataccggagagttactcggagtttaagagcttggagtttttaagcttaagcaccaatagcttatcggggaagattcccaagagtttgtcgaagttgaagacgctgaggtacctaaaactcggatacaacaacgcttacgaaggtggaattccaccggagtttggcagcatgaaatctctgagataccttgacctctctagctgcaacctcagcggcgagattccaccgagccttgcaaatctgacaaaccttgacacgttgttcctgcaaattaacaacctcaccggaaccattccgtcggagctctccgctatggtgagcctcatgtcacttgatctctccatcaacgacctcaccggtgagataccgatgagcttctcacagcttagaaacctcactctcatgaacttcttccaaaacaatcttcgcggctcagttccgtccttcgtcggcgagcttccgaatctggaaacgctgcagctctgggataacaacttctccttcgtgctacctccgaaccttgggcaaaacggcaagttaaagttcttcgacgtcatcaagaatcacttcaccgggttgatccctcgagatttgtgtaagagtgggaggttacaaacgatcatgatcacagataacttcttccgcggtccaatccctaacgagattggtaactgcaagtctctcaccaagatccgagcctccaataactaccttaacggcgtggttccgtcagggattttcaaactaccttctgtcacgataatcgagctggccaataaccgttttaacggcgaactgcctcctgagatttccggcgaatccctggggattctcactctttccaacaacttattcagtgggaaaattcccccagcgttgaagaacttgagggcactgcagactctctcacttgacgcaaacgagttcgttggagaaataccgggagaggtttttgacctaccgatgctgactgtggtcaacataagcggcaacaatctaaccggaccaatcccaacgacgttgactcgctgcgtttcactcaccgccgtggacctcagccggaacatgcttgaagggaagattccgaagggaatcaaaaacctcacggacttgagcattttcaatgtgtcgataaaccaaatttcagggccagtccctgaggagattcgcttcatgttgagtctcaccacattggatctatccaacaacaatttcatcggcaaggtcccaaccgggggtcagttcgcggtcttcagcgagaaatcctttgcagggaaccccaacctctgtacctcccactcttgcccgaattcctcgttgtaccctgacgacgccttgaagaagaggcgcggcccttggagtttgaaatccacgagggtgatagtcatcgtgattgcactgggcacagccgcgctgctggtggcggtgacggtgtacatgatgaggaggaggaagatgaaccttgcgaagacgtggaagctgacggcgttccagcggctgaacttcaaagccgaggacgtggtggagtgtctgaaggaggagaacataataggaaaaggaggggcagggatcgtgtaccgcgggtccatgccaaacggaacagacgtggcgataaagcggttggttggggcggggagtggaaggaacgattacggattcaaagcggagatagaaacgctggggaagataaggcacaggaacataatgaggcttttaggttacgtgtcgaacaaggagacgaacttgctgctgtatgagtacatgccaaatgggagcttaggggaatggctgcatggtgccaaaggagggcacttgaagtgggaaatgaggtacaagattgcggtggaagctgctaagggactgtgctatttgcaccatgattgttcccctcttatcattcacagggatgtcaagtctaataatatattgctggatggggacttggaggcccatgttgctgattttggccttgccaagttcttgtacgaccctggcgcctctcagtccatgtcctccattgctggctcctacggctacattgctccaggttccattcattattattttctcttttccttcttcataatcttaatataccatgcagataacgtacaacatgcatacttatacatataattttatcctttcaacatataatcaaatatttcatatctaataataccaacttcatattataaacatcacctaatataatcaacatgacttgataaataagacatataagttcaatatttaaactcatgtgtctgaaaaaacattaattggaaaagtcactcttaaaaatatttgataatatatcaatatgaccatatgattccaattacgatcacaaactctgttaaaaattcttgctgaagatattagtccttgaatactaatataagaatatcttgggttagaaaagttactattttactgttaattcccgtttactttagatgggttggaagttgaaaagttgagtgatttaatttgtttctggtggttgcgcagagtatgcatacactttgaaagtggacgagaaaagtgatgtgtacagctttggcgttgtgctgctggagctgataatagggaggaagccagtgggagagtttggagacggggtggacatcgttggatgggtcaacaaaacgagattggagctcgctcagccgtcggatgcagcgttggtgttggcagtggtggacccaaggttgagtgggtatccattgacaagtgtcatttacatgttcaacatagctatgatgtgtgttaaagaaatggggcccgctaggcctaccatgagggaagtcgttcatatgctctcagagcctcctcactctgctactcacactcacaacctaattaatctctagttaattaagttatttgctcatcgatccagaatcacttcttttcaaaataaattaacacagacgaaaactgtaggaataactttcatctgttgtttgtcggaagtgaaacaacgaatcaaatgtgaactatgtatcaaatgtaagataggttttaattaattttgtaatattggtgtcaactgtcaagtaattcgaaggattttccccattgtgcatgtatcaagaatttttgtagaaaagacttgttgtttataaaatatttgtgactgctactgtttcttctcccccagagtccataatttataattgtgtctgtaatgtcgttttgccaaaaaagttgatttatccttgttcctgtctaggatttatctactatttaccgtcacataatcggagagtacaatcttaaataaaattattctaaattcatgtttttgtgagtgaaaaataaatgttgaaattaagaactttaccttttaaatgaaatatttaaattaactcaactcaaattagctgcatctaatatactttttgaataatgaagatttaaggaaagagacacacgaagtttttgatgaaggtatcaattttatttgaaattatttaaaatacaaggttttttttttaatatctagtatataactatacatttttagcataagtatgaactactttgtcttaaagacataaaagagactaaattcgaatatatatgaagcgtaaagtactacaaatcttgtgtgacaatatttggtcattgttgatatatccatattattcggcgccttaccttttaagaaaaaaggagatgcaaagttacttaaattaaataattagttttcctcatttggagatggatttttttaaatgccaatagttttgatatctaaaaacaagttatgattttaaatgtttggtgtccaaactccgaatcacttgtaattaaaacaaaatttagagtaaaaatattatttaattttttaagaaaatcattctattttagtttttaacgatttttttttaaaaataaaatcttaagattacaaatgtgagacatttttattctccctccatttcaattaataatttttggaattaaaattagtacacattcattttttttaagaattattctttacttaaaatataaaaaattaaaatatttcatatttctaattttgagaaaaattttaataatttttttata

SEQ ID NO: 280 - DNA, 3672 bp, Glycine max
  source 1..3672: mol_type = genomic DNA
gataattagcatcagccataacactaacgctataagagtttgtcaggccaacgttagctaaacacaacttttcgaataccattttgtttcactttttattttttaattaaataacattgaccatgactcactatatttttcggaaagtattttttttttgtaattagtgttgaccttagtgacactaattatgaatttgagaggtaaaacaaaaagttagtgttggtctggcgttggaccacaacctgcagtaaataatactaccttttatttttatttataccattcaaattagtagtaattgtttcttttgtattaattatttccaactaaaatatccataaataaattgtactaacaattgattataagaaagatgattattaaggataatgataattttaaaaatataaatttaaaatatttaattctatcaattaaattaattattattttaatcataataaattagataatcaaatcttataaataattagcgtcagcttgactgccattgatttgtgagtaggaaagtaaaaaagttagcatggaccgtgatagtgtctaccactttgaggattgaagtaattatttaatgaaattaaaataagcccaacaacaacaattaagataaactttaatactattatatattatagaaattgagttatacttaaactggattttacagataagaatgagaagcataaaaatgggaaggaaggaagtagatattaaagcagaaacgtcagcagtgatgaaaacatagcccctctgacgcacagaatgacgaagacaaaaagcggattcctttcctatataatataataatagacaatgagcaccgtgcaatcagcaaccaaaatgactcaagcccagattcaaccagttaaacttggaacccaaggctttgaggtactattaactacattacttgctcttattttgataattgatacaattaatctcattctaggtttcaaaattgggattcggatgtatgggccttactggagcgtacaatgaccctctccaagaacaggatggcatatctgttatcaagtatgcgttcagtaagggaatcacattttttgatactgcggatgtttatggagccaatgctaatgaacttttggttggaaaggtacaaaccgtttcttttctgttactttttactgtttctgtgttttgtaaacctgcttttccttctatttgcagtggaaattttgacccattttaactaactaaacacactattttagaacagagatgtttttttctatcacgacttttgggacaatttttgttatcccttttgtttcccagggaatatttttattaaaatgattgtataagaaaaagttaaataaatataatcatataaagtgtcacacatgtcaattatttgatgctcaaagacttcaagtaatgcagcttatcttgaaattgattgtatgcaaattttcttttattaatgacttatgactcggtggaatcagttattgattttgtcatttttttattctgtctactaggctttgaagcagctgcccagagaaaagattcagatagccacaaaatttggtattgcttcacgaggttttcctgatatgaagatcaagggttcgcctgaatatgtgcgatcatgctgtgaagctagcttgaagcgtcttgatgttgaatacattgatctctattatcagcacagagtggacacatctgtacctatagaggaaacagttaaggatttcttcctctcaatgattttgatcatagtagactttatatatatacctgtgaaaatttagtaatataatgatattatctggcttatctcactagatattagatatgttattaacgtttgttataatattataggtgggtgaacttaagaaattggtcgaagagggtaaagtcaaatatattggattatctgaagccagcccagatacaataaggagagcacacgcaattcatcccatcacagctgtgcaaatagagtggtctttgtggactcgtgacattgaagaagagatagtccctctctgcagctaaagcgtgtttatatgatttcattcataatcaaagtttgaatacaattagaaaccaaataaaaaatatgtcgactaacataaaatttagaattctttgataaacaatggataacttaatttctaacacaaacggctataccaaagatatcctcttggtcgtggcttttttggcggcaaaggagttgcggaaaatgcctgcaataagctccctggtatatagcaatttggcatgtacataattctgctgcataccatggaattgttgataatgacaaattatcaaatagcaatgatcaattctcaatcttgagtgaaacattggttggtttgttgtctgttaattgcaaatacttgtgtgtttaagctgaagtagtgaaccatatttgtttttctccataagaatataagattgtacattttcttttggcaaagaatggaagatgttgtttctgagggttatttcaattatcagaaagcacatccacgctttcaagccgagaacaagaatatatatgaacgaattgaaggccttgctaagaagcatcaggccactcctgcccagttggcattagcatgggtacttcagcaaggcgaggatgtatctgatactcactagtctctgtctctctcagctagtatcttaggtatcaatagttttgaaaaaacattacaaaatattgacaatttaataatattaattaaattaactaattttctttaaaaatgtgaattaattaaaaatatcttacaaaaagcaaaagagaaatattaattaaaatttattacaaatcatatttttatagatcttattatatatttattgactttttctgttgtaatttttaataaattttaactactacatgttttctaatttttaataacttttgtttactgcaatgataataattttaaaagttggaaataataactgaagaggttgattgtaataataatgattttaaaagttagaaataataaccgaagagtttaactgtaataataaaaaaaatactattaggtaatgagtttgactgtaataataattttttggtctttggtctttaatacattttttttatcattcagaatcagaagaataataatacatagtttaataacagcataaaagctttacacaaaaaatagaatcaaatgtaaactccattgagatttaccaatatccggaaaaattgtttagcataaatctctaaggttatattcacatgagattattttaaagtaaataattcattttaaagaatcaagttaataattttatatatcaataaaaaaataatgattgattttatattacattatacatacatatatatatatatatatataattagtatataattataattaaggagtttagtctagttaattaaacatgtgttgagttagtgtatactctcttatacttgtctttaatttttatgaataaaaaaatataacaaagtataaataaaatataatattaatcattaatttttttaaagaattagtaaagtgatataagattccgtagtttcgttacatctttccaaatgtaaaaataatctatttaattgaaaaattcatatttaattcttattcaataataatcaca

SEQ ID NO: 281 - DNA, 4035 bp, Glycine max
  source 1..4035: mol_type = genomic DNA
ttattattacgtcacccattttatatgtttttgtgagtataatctgtccaaaaatacattgaatggaaggcaataaatatccacttaaaataatattttttaagacaaaataacatttattttatcttttctcttttttatttatatggattctatatcattttgtgtggatataatttgtctaaaaatataattaatgaatgaaagataataatgatccacttaaaataatattctcaaaggtaacataatttttttatattttattttcttaattaaatagaaatatatattttttgtgtgaatataatttgtttaaaacatattgaatgagaaaccataattaatgatccacttaaaataatattttttaaggtaaaataatattactccagtcacctctaacatattatgaagtatttcttttattttgagagctggggataatatctctctgtcaatacatgcatccaattacctttaacagagtgacctcataagtcatttattttatgtctttaatgagtgttaactttaactccactgaagaatcttccacgtcatccatttatgaaaccctttaaacagccatggccccacctcactatagacaaacaaggaactgtgggagttacgaaaagaggcattgttctcctactgcagaaaccaccattgcaatttgcaccctcattctcacgttacacacactctgcttatattgtagagcaagcatggcttgaagtttgaacccatttactgtttttctgatgcagttagtttcaaatgggcggctttgatatggccatttgtcacaaagaaacagaagatgactgatttactctctgcaaatccaccaacgtgtcatccattgcatgtccctgattttacgatggtccatgcatgatcacaaaattacaaaatagaggtccctgatattttacccttcagtttttttcttttctttttgagctatataaaccctaccctatacactgtaagcaaccaccagaaactctcactagcttagtttctatatatgcgttatttgtctctgagtactttttctctcttgtgcattacctttgtggtcatggcagcctccgtggatcccctagtggttggtcgcgtgatcggcgatgtggtagacatgttcattccttcagtcaacatgtccgtttactttgggtcgaagcacgtcacaaatggctgtgacatcaagccatccattgccatcagccctcctaagctcaccctcaccggcaacatggataacctctacacactggtattcattcatgtttctgttgagagatctcacatgcatgcatcaaggtttttcttaattttatgctttctctttttctttaatgtgcctacaggttatgactgatcctgacgcacctagccccagtgaaccaagcatgcgcgagtggatacattggttagtaaatttgttttagttcttcctattcttagtttctaactccatatatataaactgatatgatcttgctgtttccacttattttccaggatcttagttgacatacctggaggaacaaacccatttcgcggtagtaaaagaaatcttttggtctacttcatatatgacatttttattttcttctatttataaaagtttcatgatgttgcatgcatgagtactactgggttcagttctacttaattaatttttcttttcttcgggctaaaacatcatgttttttaattttttgggcgtccatcgcactgactctcgatttcagaaacatttttcttcactggtcataaaaatcttaggccatttctggcaaaatcaacatgcatgttcctacctaggctcctcgcatgcatgtttcagatttcttctggaaaaaaaaatcacagaatttcagggctatgtcacatcttgtgtgcacactctctttctatacatcaaatggtactctcacacctgtgatctaccaaaatttggatccaatgtccaccatcccccacgtgtcctgcttgtgcctgctatgaacacgtgtcacaacaaatattccatctctaaattctctgaaataatcgttaaataattgttaagtatagtaaataaataaattctcaattattctgtcatattttctctaaaaccattcttcaataaattaattttagattttctccgtgcatgcaccaatttagataacatgtgttagctagggaatctccttttatgagatcatcacacgtgccccatagcttgcatgttatcaaatttcagaattccatcacaagcaaatgtgtcaaacatgaagcaatatttctccaactccaaagtaaaaatattttgaattatcacctttctttggtcctgtcatttctaaaatataatcttcgcatctagcatacaggatattagattaatttttcctactttcaacagttaacattgatttcttgtaaacaataataatttgattcatgcggaacaaagaaatctaataattaatcaagtaaatggtcttctttgcagggaaacaaagaaatctagtaattaatcaagtaaattgtcttctttgcaggaaaagagattgtttcatatgtgggaccaagaccacctattggaatacatcgctatatctttgtgttgtttcaacagaaaggacctttaggtcttgtggagcaaccaccaactcgagcaagcttcaacactcgttattttgccaggcaattggacttgggacttccagtggccactgtctacttcaactctcaaaaagaacctgctgttaagaggcgctgaatctagctatattgtaaccatcagtgtctctcttgagatatgcatggttggaatatacttttaagatatcagaactatataaaatctatgactagtgcgtaaataatgcagggagagggtgtgtgtaaagtaatatagttgtccaagacatgagtggtgccgaccatttccccggctttgataactttttttctctatatatatacctctctttcactctatcaaatatataaagttaatctttattaattgttggtgtgcttcactgcttgtgtatatgtatgtgtttatccttccaatttatccttactgttgtgggtacgtgcaagtctgttttaattataatgatataaaaatctaaaataatttactgttatgagtcatgcaagtctgttttaattataatgatataaaaatctaaaaaaattggagacaaacttataaatacaaatataggaagaaacgtaaaaagttgaatttttaaaaggatatttattatgatttacaagaattgaatctcatagcaataataataataataacaagcaaattaaacttttctcagtaactatcattctttacctgaattatcagattacatgggaaattgtattcataaatttgactgattgatgatgcaatagaaataaaataaaataaattataaaaatgattacagaatgtattgtttcataatataatcattttttcaagtaaatataattatctctttaaattttaagacttgccaaaaaaaattataaataaaatatttttttaattatcaccagaaagagtatatatacaaaagtgttttcgtgtaaataataatatttatgtaaatttaattttttttatgacagacatgtgtgtgcaaatgagttattcatgaatcattaatattaaacttataaagtctggctttggtttagatgaaaatggttgcctagaatgatactcatatctggggtgttaattctagtagctagtcatgtttttagatgaaaatggtttgccttgttaatttatcaaatgtctattaattctatatattccttaacatgtatatacattgaaaataatcattctaagcaaatcaatctagcttcaaattcaatacaaaatgtaggtttgataacattaattacatatgcacgtcatgccagcagacattaaataaatttttcgactaaactttcatatatgaaattatccttattaaatcgtaatgaaactagatagatgaa

SEQ ID NO: 282 - DNA, 5564 bp, Glycine max
  source 1..5564: mol_type = genomic DNA
aaattaaattaattaatttctacttttatttaaacttttatctacttatgaattactataatgtggagaggtaattaaatgtctctaactctttttaaaaaagaaaatgtctgtaacttaatatcctattcctattaaaaacttccaatatttagtaaggcaggaattataaaagcacaatatatttgagagttttgagcaaagatgaaggaagcggaaataggataaatgttaaatcatacccgctccttcctctctctctctctctctatatatatatatatatatattaatgttttgttttttaaacagttgatgttttaggatttcaaagcttaagtaatgtacttttctcagatgtatctttttttaatattcactaagtggtataaatattaaaaatcaagctatcaaataaagatattttagtttaaatataataattttaaattttattaaatatttaaaatctatatatgataaccctaaacatcaatttttaattccattaaatatttttattctcagatgggaagggaagcaggactatcaatgaatcttcatactccattattactgcgcgcggtttagtgttttaatgatattattattaattgtgtgttctcattgaatagaaatttgtttgtagaaagaagaaagaggacgtaacgtaacattaataatttaagtcgataataaaagaggagtgtagatacaagtatggaggagagtggaaataggaaaaaatagcttagagagatttatttacgaacaggaagagtcacatggcatgtgtccagtcttccacatgataaatacccttcttaccttccttactaggacttttgactctctctctctctatctatggtagtagtagtagtagtattcattcattctctctaatggcagagctcacaccctaaacacaaaccagagcctctgagagaaacaaccacaaactctcccttaatcttgtcggtttccatatctgctgaaaatgaaagctctgtacagaagctctctcttgctcttgctcttgctcttcatctccgtgtgttttgcatcttcttcttctccggtcactcagcaactcctaagcttcaaaaactctctcccgaacccatccctgctccccaactggctccctaaccaaagcccgtgcacattcagcggcatcagctgcaacgacacagagctcacatccatagacctcagctccgtccctctcagcactaacctaaccgtcatcgccagcttcctccttagcctggaccacctccagtcactctccttaaaatccaccaacctctccggtcccgccgccatgcctcctctctcccactcccagtgctcctcctcattaacctccctagatctctcccaaaactccctctctgcctccctcaacgacatgtcgtttctcgcctcctgctccaacctccaatccctcaacctctcctccaacctcctccaattcggccccccgccccactggaagctccaccacctccgcttcgccgacttctcttacaacaagatttccggccccggcgtcgtttcttggcttctcaaccccgtcatcgaactcctctctctcaaaggcaacaaagtcaccggcgaaaccgacttctccggctcaatttctctccagtatttagacctttcttccaacaacttttctgttacgcttcctactttcggcgagtgttcttcgcttgagtatttggacctctccgctaacaagtacttgggcgacattgcacgcactctctccccttgcaagagcctcgtttaccttaacgtctccagcaaccagttctccggtccggttccttcccttccctccggttcgctacagtttgtgtaccttgctgcaaaccacttccacggccagattcctctctccctcgccgacctctgctccactctcctccagctcgatctctcctccaacaatctcaccggcgctcttcccggcgcgttcggcgcgtgcacttctcttcaatcccttgacatctccagcaacctcttcgccggcgcgttgccgatgtcggttctcacgcaaatgaccagcctgaaagagctcgcggttgcgttcaacggcttcctcggtgctctcccggagtctctgtcgaagctctccgctctggagttgctggatctgagctccaacaactttagcggctcaatccccgcctcgctgtgcggcggcggtgacgctgggattaataataatctgaaggaactttatctgcagaataaccggttcacgggttttattccgcccacgctcagcaactgttcaaacctcgttgctttggatttgagtttcaacttcctcacggggactattcctccgagcctagggtctctttcgaatctcaaagacttcatcatctggctcaaccagctccacggggagataccgcaggagctcatgtatcttaaaagcctcgagaatttgatcctggatttcaacgacttgactgggaacattccctctggcctcgttaactgcaccaagttgaactggatctccctctccaacaacaggctcagcggcgagattccgccgtggattgggaagctttctaatctcgccatactcaagctcagcaataactctttctccggccggattccgccggagctcggcgactgtactagtttaatatggttggatctgaatacaaatatgctcaccgggcccattccgccggagctgttcaagcagtcggggaagatcgccgtgaatttcatcagtgggaagacgtatgtgtatataaagaacgatgggagcaaggagtgccatggtgcggggaacttgcttgagtttgcggggatcagtcagcagcagctgaacaggatttcgacgaggaacccctgcaatttcactagggtttatggaggtaagttgcagccaacgtttaaccataatggttctatgatatttttggatatctcgcacaacatgttgtcagggagtattcccaaggagattggggccatgtactatttgtacattctcaatttgggtcacaataatgtgtctgggagcattcctcaagagcttgggaagatgaagaatctcaacattcttgatctgtcgaataatagactggagggccaaattccgcagagcctcacggggctttctttgctcactgagattgacttgtccaacaacttgcttaccgggacgattcctgagtcgggtcaatttgatactttccctgcggcgaagtttcagaacaactctggtctatgtggagttcctctgggtccgtgtggttcggagccggcaaacaatggaaatgcgcaacatatgaagtctcacaggaggcaggcttctctggcggggagtgtggccatggggttgttgttttccctcttttgcgtctttggtttgatcattattgccattgagaccaggaagaggaggaagaagaaggaggctgctcttgaagcctatggtgatggtaattcccattcgggtccggccaatgtgagctggaagcacaccagtactcgggaagctcttagcataaaccttgcaacatttgagaagccgctccggaagcttacttttgcggaccttcttgacgctaccaatggttttcacaacgacagtctcattggctctggcgggtttggggatgtgtacaaggctcagttgaaggatggaagtgttgtggctatcaagaagctgattcatgttagcggacaaggggacagggaattcaccgctgaaatggagactattgggaaaatcaagcacaggaaccttgttcccctgttgggatactgcaaggtaggggaagagaggctcttggtttatgagtacatgaaatatggaagtttagaggatgttctacatgatcagaagaaagctgggatcaagctgaactgggccattaggcggaaaattgctattggagctgctaggggattggcttttcttcaccacaattgtatcccccacatcattcatagagatatgaagtcgagcaatgtgttacttgatgaaaacctggaagccagagtctctgattttggaatggctaggcttatgagtgctatggatacacatttgagtgtgagcacattggctggcacaccggggtatgttcctcccgagtactatcagagcttcagatgctccacaaaaggtgatgtctacagttatggtgtggttttgttggagctgctaactgggaaaaggccaacggactcggctgattttggagataataatcttgttggatgggttaaacaacatgccaagctgaaaatcagtgatatttttgacccggagctcatgaaggaagaccccaatctggagatggagcttttgcagcacttgaagattgcggtttcctgtttggatgatcgaccgtggaggcgtccgacgatgattcaagtgatggcaatgttcaaggagattcaggcgggatccgggattgattctcagtcaaccatagccaatgacgaggaaggtttcaatgcagttgaaatggtggagatgagcattaaagaagcccctgaattgagcaagcattaggcattaaagtgtcgtgtggattctttgggaaacagacaagaagagaggaggagatgacggattcagctcccctcagttttttccttctttgccgcttcaaattatttcagacataagggaaaacggttaaaaggggaatgaatgcttttgatgtatgtattcttgttattttatacataaaaaaaagttgtttaacttgtatataaacagcttcagttgttaccatctgtgttttcctagaattttcaaagtacttttctcattcaaatataatcctgaaaaggttctctgttcaatctgcgaccccagtgatggcaactaagtggatcaacagcaacttttgctccgatttgcgatataatttgtcaaaacatgcctctaaaatcactctaacatcaaatttcttgaataacaattttatacactcccctcctccaacttgttatgtgcccttctgacccttcttgttttgtttgctagttaaccatgtaggaaaaagtatcactccactcaatagtattttcacttcatctggccataaataattttggcctaattcagcatcacgtatcaggagtcaataagcttgtctgtccgtctgtatttatcatctctcttcgtgctactatcacctccccttttcttatggatttttcctgttaaaaaacaaaaaggaacaggtaacccacttgaattaggacaccaatgtaggtgccaccacccgtttccttctgttgagtgtgcacgcttattggttcaacctcagaattaaattcttcataatcccctgttgagagaaaattataatagacaaatcaaattgtgtggacttgccatttcccaaaacattttcattttgtgcgcgtgtgggtggtggggtgcgttttattagaatgaagactgtaaaaaagaggagtgtaggatgataagaagtagtaaatgtcagttgtcaaaagatgaaaagcaacggaggaagggaccaaaccttgacctatggaaa

SEQ ID NO: 283 - DNA, 4012 bp, Glycine max
  source 1..4012: mol_type = genomic DNA
ttaacattatttttctgtttttggccattggtccagtgttgtttatgtaggtctgtgaagaaacaagtatagtagagcttttaagataccctcttctctcaaggctttatattgaaaatctttgtcacataggggtgtagtcttcattgcacacgcatcatcactagtcctcccgctgcctcacaaagtacaatttgaaaagctctacttcctgaaatgcctatagaatatgcggaccaatgcacaacacaaaaaataaatagccctgatggaaagggaaattcgatctaaatctacatctcatcttttaataagtgtatgtacggaaagaggagagatataaaaaaaataaaataatagatataataaattacttatttgatgaaaaataaaagttaaaatataaaaagagaattgaagtaaaagtgagatggaaaaaaaaaatggatgtatcaccaattgaccataataactctatatgcttcatgcattggttgggacccatgaaatgcacaataagttcacaaatacatttttaccctccaattcatcaggtaagtacagaatatatatcttggtagcttgctgattcgacttaataattatagagtaagaatttaaaaaaaaaatgtatgtgtgtgtataggggccatgtctgatatctccatcaaaagaagaacctattgaactcccaaatcacaacccgcatcattccattgccattcattcattcattcagaaaatctactcttttttttttctttccttccatccaatatatcatttcatgcctcatttttctaccttttcccactgtctctgtgtgcaaatactttatttcacacatacctggtcatgccttttcgtccaagtaattcctgatagtaccctcactttctaagctctcttttgtcccttccctttttatgaacaccactctgtcaccctcagtccttctctctcagatatttatttatgattttctctctttatcactccatgtactatatgtgcctgtgcctcatctatcatctatcatctatcatctatcatcacctattataagtttataacccccctcaccctttcctccccttcataattcatgcagtagtaatctctcttctcacctatataccctctaatattctaattctctctcttgatccaacaaacaaacactaccattttgtttgttctgagtagtgatccatgatggaacctcaacaacaacaacaacaagcacaagggagccaacaacaacaacaaaacgaggatggtggcagtggaaaaggggggtttctgagcaggcaaagtagtacacggtggactccaacaaacgaccagataagaatattgaaggaactttactacaacaatggaattagatccccgagtgcagagcagattcagaggatctctgctaggctgaggcagtacggtaagattgaaggcaagaatgtcttttattggttccagaaccacaaagctcgagaaaggcagaagaaaaggttcacttctgatcataatcataataatgtccccatgcaaagacccccaactaatccttctgctgcttggaaacctgatctagctgatcccattcacaccaccaagtattgtaacatctcttctactgcaggtaggttaaccaaaccaaccatatacttatttacctctctcacttcttatctctcaagttattttcttaactttgctccttttaggataagtaaattaaatatgtcttattcttatattgtggccatgtttgtgtatgtagggatctcttcggcatcatcttctgttgagatggttactgtgggacagatggggaattatgggtatggttctgtgcccatggagaaaagttttagggtaagttaattaagatgactcctaatttggtttttatggacatgaaagatgttatatacaaaaaaaattataccctctctcccactctaatatgaattcctagctatatatactttctcttttatcattgctcagtgagcatatatgtaactttgggatgcattgaaatggaaagcaatatccatgatccatgacatgtgtagtgcacaagtaagtgatagtctactatatacccacgatatattatttaagaacaaaacggagcgacaatccgtcttttacactattcaatccttgaaacttccataaatggaagaaccccaccggtctcttgactctcttctataacgacaaagcaatgtatgtataaaggaaaacatttcatgagtaaaacttatatatttctcttgagagagagggagtatccaaagttcaaacaaggagttcactagcttataagtagatttagaaatcatttcataatgaagtgtttgattaattcttaattaattcattttgttttgaacccttttaattaatttcttattaggactgctcgatatcagctgggggtagcagtggccatgttggattaataaaccacaacttggggtgggttggtgtggacccatataattcctcaacctatgccaacttctttgacaaaataaggccaagtgatcaagaaacccttgaagaagaagcagagaacattggtgctactaagattgaaaccctccctttattccctatgcacggtgaggacatccatggctattgcaacctcaagtctaattcgtataactatgatggaaacggctggtatcatactgaagaagggttcaagaatgcttctcgtgcttccttggagctcagtctcaactcctacactcgcaggtctccagattatgcttaagatatatcatatatatactcaacttattaattataagatgataatgatagccttgcataatttggttatcatcctatgattaattgtagtttatatattagactctgtgtgtttagtcagttatggttttatataatcagtgtgggcaaatgtaatggtgtgtactcagtttaagagcctttccctacctgacacatgtcatgcgggggaacttaatggactgactaattaatcatagttatgttattttgtccacctctctctccaacattctttcattacttagctaactgaaatgattggttcagaaaaaataacaataatgatgatggaagttaagtttatcccaaaccattaccataaacataaaaaaaaacaaataacacttaatcatatgcaaccgaccctctcaatattggcttggaatggaagatttaagtgtctctctaatcaactccttatccatttttagtttgtttccatgacatattcaacaaacaatattatcctaatcagccagttcaaaacctgtgaataataaaaaaaaaagtcactccgtcattttctatgaaccagtgaataatgaccccttttttttcttaaaaaaaattagcttaaggtacataataggagtgtttcttgtattgttaattttttacataatttgaatttttaattatttttctcataagtgagatttttcccggcccttattagcatttaatttgagccccgaccgttatgaaattctcttccaacaattaatacatgaacacgaattaatgccagtttctcatgattgagatttatttaatgtttattaagagagaataaactcaacatttgaacacgacatacataaaacaattcatttttctgtaaaaagaaaacaattcattttgtagtaagagtagtatacttttgatattatttttaggaattagctagcttgcgggtatttctatataaacaaaatttaaaagaaataagcataaaaagtatttacaaaaatatcttaaggagattgattaaagagtatttgatatgttatgtaattttaaaataattaaaattatttttcatattatactaaattgttttacttattgaaatatatatatatatatatatatatatatatatatatatatatatatatatatatatattattcagattaaaatatactaaagtaaatacttgttaatttcttaggaa

SEQ ID NO: 284 - DNA, 3695 bp, Glycine max
  source 1..3695: mol_type = genomic DNA
ctttggtctgaatttaagagttaagtttttattctgaaatgacctcttaggcactcacacacttgtactctataggcgtgtctagccttgagcatttgtggtggagttcctttaattatgccatctttatcacgaatcttccaacacaattaaaagaaagactatggctctgagggaaaatggagaatcacgcacccacaaacagaaatgttgcacattgtgtgcatgcaattaaggaaggttctctacgcaaggcatacaacaaaaatttctgcacgtccatggtactaagagaatgctaaaatgtgggtgttcaagaaacgaagcacttcctagagttgttcccttttatgcttttagtttaataatgaaacggcagaagcttgacaacttgcaaagggagaggacccacatacacatgatgcttttttttacctgatcgagctgatgggaagaaaaaaaatgggaagttttgtatttttttaatattttttacaattttttttagaactgggatggatgggatggaattaaaaagaagtacactgtaaaagggttgttattagaataaaaaaaaattgctttattggatggaaatatccatgcatccattcctgtgtacagccaatcaattaagaaccgattctaatggccccattctgtgtttatgaccaggggagagaggaaaaggggaaaggataatttgtcacatatcatgactaatgtgatttcagcacaaacatcccagacccaaaatcaattgttgagatgagccaaattaagagataatatattaggggtagtgggaggaccttcacggatgcacttgatttatttgtaggcttttttcattttttgtttttcctgtagaacatgtttttttctctaaatctaaagaatgtgttgcaacatcttttaaaggaggggggaaaaacactctaccttgaaagacactttttaagacattataaatatagagctcacactccctttcctcagcaggattcatcataacaattgtattcctcccttccttagctccactacctcttctctcttcctccttgttccttcctcttacaatggcaagaatgcctttagagcctctaatagtggggagagtcataggagaagttcttgattcttttaccacaagcacaaaaatgattgtgagttacaacaagaatcaagtctacaatggccatgaactcttcccttccactgtcaacaccaagcccaaggttgagattgagggtggtgatatgaggtccttctttacactggtactatatatatatcttttatctcctctcttattccttttctctttaaagaacaaagttttttgggaaaaaaaagagaggaaaaacttgagctgttgccagtgtgtatctttgttgtttcctgtaattcagctcacacagtaagtctcttttggagttttctttaccaatactgaatcattaagctaatgtctcgcttttttggtgcagatcatgactgaccctgatgttcctggccctagtgacccttatctgagagagcacttgcactggtacttaatataaagattaacttaagtagtcatttattatattaatgatcatacacacacatatatagctaccggtttctcttaacaactcaacccaaacgaaaattttatgatatataatactttaaaagttctgtatgtactggttatccatatgacattcacgttagatgtctgtattttattatcaagtttgaagttttgcaagatatatgcacccctttcatcacatcaaactatggacaggtaattaatatataaatacttacatcacatatgaggaaggtacacacatgcctttgtattctgtaagagttgcatgctccatcatcatccgttctccctaaaatcaaaacaatctaaaagggtgaattgaataaatataacagaactacatataaggaaaactagctattcattcataggtatctaacagtaaaaaattttgttgcatacattctttttgctgcaggatagtgacagatattccaggcacaacagatgccacatttggtaggtttcatatgaaaaatgtgttatatgggaattacttactctgatgatattgatgagagagtgacaaaaaacatgatattcctaataattttgtagggaaagagttggtgagctatgagatcccaaagcctaatattgggatccataggtttgtgtttgtcctgttcaagcaaaagcgtagacagtgtgttactccacccacttcaagggaccacttcaacacacgcaaattcgcagcagagaacgaccttgccctccctgtggctgctgtctacttcaatgcacagagggaaacggctgcaagaagacgctagctatagctgctgattttgccactgcttcaaccaaactagtattgtattgtattgaataaagcgataaaaaaaggtacaagtacaaggagtttcagtagtggaattaagttgatcctcacatgtggcttcaaataacttgcaggaagggaagataattaatcattttctagtttgacccgtgtgtatgctacgttttattttactttccatctgttgtgtaaacattatactactacgtgtattattattacctcgtgggactactatgaggtgtgatcttatatatagaaataagaggtttggtacgcaattgtcgtttcttttactttaatagtttagggtttagcttcgtttcttctttcctttggtttgtcattgcgggtttcaatcactcagcaccttctctctattgtttttttcgatctcttcacaactaaattacgtttttaacagaaaaagtatcattatttaattactatatgggactttatgaaattatgagtgacctgtacacacttgcgatcttgtcgtgttgattattttttctccattcagatgtgaaacctttcatattatttttcagtaatacgaggcttgctcatctatataatatttatgacatctgccttttgctaacttgatggattgacccttcaggaaaacagtgatttctacaccaaatttccagttaaaagaacttcttttcttatcggcactgctaaaattaagaacatgtgagatagtatatgtattgccaatagtgtgtttcgaaaccgttagtttgcactcttttaaatgaaaggtgtaatcgttccaatacactaaacatagaagctgtgaaatcaaatgaggttacgttgaaatcacacatttctacnnnnnnnnnnnnnnnnnnnnnnnnnnnnnnnnnnnnnnnnnnnnnnnnnnnnnnnnnnnnnnnnnnnnnnnnnnnnnnnnnnnnnnnnnnnnnnnnnnnnnnnnnnnnnnnnnnnnnnnnnnnnnnnnnnnnnnnnnnnnnnnnnnnnnnnnnnnnnnnnnnnnnnnnnnnnnnnnnnnnnnnnnnnnnnnnnnnnnnnnnnnnnnnnnnnnnnnnnnnnnnnnnnnnnnnnnnnnnnnnnnnnnnnnnnnnnnnnnnnnnnnnnnnnnnnnnnnnnnnnnnnnnnnnnnnnnnnnnnnnnnnnnnnnnnnnnnnnnnnnnnnnnnnnnnnnnnnnnnnnnnnnnnnnnnnnnnnnnnnnnnnnnnnnnnnnnnnnnnnnnnnnnnnnnnnnnnnnnnnnnnnnnnnnnnnnnnnnnnnnnnnnnnnnnnnnn

SEQ ID NO: 285 - DNA, 4236 bp, Glycine max
  source 1..4236: mol_type = genomic DNA
cctctttacaaacatacaagtcataaatagaatataaccacctccaatgcatgaccgcccattaagaccactaaatacatgtttgggtaagcgtcttagaagtacttctaggagaaaaaataaataaaatgagattttctataagctaatgaactctctcatatagtttttctaaaagatgagagttaggacatatacaaattagctaatgaagaactaattttatcttatggagaaactaaatttttttcttcttattttcttgttttagaagtgtttctaaagaaacttatcggaacatgccctttgagaagaaatagcttctcatagtaaacttagtttgtaatttattgttttacttccaagtttaaagaaggattgccttgcttctaacataattctagtagccaagaaaaagcttgagcaaacaatagcataaggttgtgtgtgtttttgtgcataacaaagcaatatttttcgagagttactatttaatccctcttctatcgtgactctttggtctacctcaagcttgaattaacataatgatttttacataaatctcaaaacatgggttcgcaaggtgtcttacttaatacacaggacgatatatattactgtaactatgctaggtttatagaaatgtgaaaatttcataaatacaaaacaatatcaatatcatgcggaagctaaacaattaactatacaaatataccatacattttatataaggaaaaatccagaataaatatgaataattttaaattgttaaaaaaatttactatttaaatttttattttattcttcccgggaatagttccaagtctatacataaaaccaaaaagattattttctagacaacacaggtgggaatatcccttcccctcgtccttcactctgtataaatagctagcctggtgggtgttgtagtacaattgtttgtgacacaaaggcatatttgtgtttagcagtgtgactcagtgaagtgtgtgagttagttatgcctggcggtagtaggaaccctcttgttgttgggcgtgttataggggaagtaatagatccctttgaaatttctattcctttcagggtcacctatggtaatagagaagtgggcaatggttgtgagcttaaaccttcccaagttgccaaccaacccagagtgagtgttggtggagatgacctcaggaacttctacactatggtaattagttacatgagttagttatcatattatatttacatatatatagtgctttgctaaacaaaattctgtttaatttcgtttcttctatcaaaggtcctggtggatcctgatgctcctagcccaagtaaccctaatttcagggagtaccttcattggtgagtacataccttgcataccgttagatgaaccaaatttacatataagagagactttaatattacattataactaatacccttccctctatggattttctataggttggtgactgatattccagaaactacagggcctaatttcggtgtgtatatatatagttaattttaccattcatttaaaatattacaaataactcccttgaattataagttaattgtaaaaagaatattgagaattaggattatctttttattagtctaactcgtgtctatcaaaaaataaactgttagtataaatattattatgagtgtatatataataaaaatgtgatacattatactaacacttatatattgataatatatattaatttctatactaataaaattgtctattaatatgatttgtcatacttttaatacagacttccaatattaatactaaggatttatttgtttgttagtcaaagattatatatactaacatagattaatccaatgtcgtatcctataagaaaataacgtttctttttatagtaaattcaaacaagttctatatatttatttatctgctagatgtttaattagttttaaattacccaaaccgggacaaacattaaatagtataaaaatatttgctaaaaaataacttaatggataattattagtacgtctaatcatgctaaaagtcagcgtagctacgatatacaagcattgttaagccttttctttttgttaaaaattcccttgcacgttatacttttcttttgaggctttttcattgtgttaaagtccctttatatttttttcctaaataataactgaaactttcgtttagaagatagcggaaatattacaagaaatcatataaaacaaatggcaaaatacttaattttataaactatattacaaattaaagcgtgaaaatgtaaatgaactttataatattaaaaatatttgttttcttataccaaattagttacttttgtgatgtctttaaaaaaaagctacataactctactgctatatatcatgtacaaattagattaatattatagagattttatatttgtacaacattttttaacattaatactgattattattttttatttatttcactttttatattttgttcgcatatcacgtcacaagatcataaaaagtgacatgaatatatacaacacccaaattatatattcaatttgaatctgctattggtagtttgtcgacaagtttgcgttaccacaatccgattttggaacctatcacatcatgcgcgaaacactagtttcaagaaaatctcttgtcgtgcagggattggagtataaaagtattggaatcatttatgtggccaacgtttcttgatatatacttgaaatgcaaatagggtttatatgatgatacataacatctcatgcaggaaattaaaaatgattccacgaggcatcaaattctaaattacatgcgatgagacaaatgactacatgtcccaaaagatatataaatatctaattccaataataaaaaatatgtctaacaccaaaatatatgctaaattttgatacacgttagtagtatctcagtagtttataaatatatatatatatatatgctaattacgagtttgcatgatttgcacgtacgaaggtaacgaggttgtaagctatgaaagcccacgacccacgatggggattcatcggttggtgtttgtgttattccgtcaacagtttagacagagggtgtatgctcctggatggcgacaaaatttcaataccagagaatttgctgaactttacaaccttggattgccggttgctgctgtcttcttcaactgtcagagggaaagtggctctggtggtagaacattttgaaagctatctcttctgttaatgtaccaaaagtgcatatttagttaatgaatactactatatagcacccaaataagaaaggtaatctacatataataacactcatgggtcacatatgaatatgtaaccgaagcactcatgtgtaccgctttatgtttttatatatgtgtacttatatcaatataaatatagaatattaaacatttgactattagatcaattcccagatcctccaagtggagctttgagggtgagtttagttgtgttaggagagaaaatgaccgaatgagaaagaatacgtaagagaaaagaagagaaatagaataaaaataataaggatttgattgaaatagaagaaaataaaagaaaaatatttaaattaaagtgatttgattggcaaataaagaagagaaagaagataaattaatattaccgagcatgaggtccacaacttttttgaaaatttccccactaatctctcataccaaatcatcaagcttttggaattttctctctcttcccttctcctctcctttctctccttcatatcaaaccaatgctgagagtttgtcaagtgtcaccaaatgattggaagtatgacttgtcttttatttaaaaaacattgtgacacggatatatatatatatattcaaaaagttaaaaaggatctaattcatttaggcattacaccccttacttgatcgtgataattgaaaaagacattcatgattcagttatatttaaagataaattagtaacttcaagaactctaaatcatcaagtgaaccaaatcatctataattacatcccatatattttagattcctcttcatgatattgtggagtattgcttgaagaagtaaaaaattgctatgaacaaatactaaatcttccgctctatgtggtgtcatcttgataatttgaagataattgataaatgaataagtactctgattcctttcacaacatgaagatgaacaaatgttgtgttagtaatttaagg

SEQ ID NO: 286 - DNA, 8476 bp, Glycine max
  source 1..8476: mol_type = genomic DNA
aaataataaagtactaataaaatcaataatttgatatggtctagtgtatagcctactgctctacgcataataatgttataaaaaaataataaaatcaattaaataaaaccattcattctgtcgttaaccataagggtagcacaacgaacaggaataatgggcggaggtgcgcattaaacaaagcacaggtattagtcatgatgaaaaagggtttgttttggttttgtttttttttttttttacggaaggatttgtttgttttaaaattaagtaaaacaagtattttatgccgataaatatttttttttatataattaaaatttgtattaaattatttttaacatcatttatgttataattataatttataataaataaatatcgttgaatatatatatatatatatatatatatatatatatatattagatttataattaattaaaaatttaaaattttactataattaattttatttttaatcatttacagattatttaaaaaattaaaaagtttaatttagaaataaagataaatgaaagtaaattgaaagacataaacgagtaagaataacgtttggctaatcgtgaaatacacaacaaaaaaaggagatgaaatattgataatctgtaattgaaagaattatgagagttctcttgttgctttaaattatgtattctaattataatgaaagggtattaatttcaatacggatagtaatatttatgcctgcagcctggcctttcctttgtagtatctttgtgcgttgccttcaatgccttgtctattaatccttgtaaattattgtgagtaccattggtactcttaatagatcctttttaattggcctataaattaattcataaaatttatgttaaacaaatggcaattggaagtgtgtgtaattaatattaattaagtttaactaaatttacattgaaacatgcacatagtgtggataattatggactttccccagctaaatatataatatatacttatatgtttgggactcgggagtgaatgatcatgactactgcaattcactacttgagagtttgaaaatggtacttgtgctatggtcaagagggactaagaacatggacttcctaaccctcttcactcttctactcttgttattcattcatacagcactctcttctacccaatatcatgatgggaacatcttactcactcatcgtaagatcttccccaaacaggaagctatcacctcgtacgctgtcatctttgatgctggtagcactggtagccgtgtgcatgtcttccatttcgaccagaacttggatctccttcgtattggcaacgaactcgagttttatgataaggtcaaaactactaattcataagctacagttatatttaacgaatacttacaacactctttctactaaaattcattagaagtcgcaaattttagtagttttcctttttatttaacgagtttcaacttctgaattaaaaatgaaacctatcaaaatttataatttccgaccaattttaaaccaacaatagaaagtagtgtatgaaaagtgtcactaacattcctagttatatttacacattcatgtcaatctccattctcttcacttcttacagtcttcattaattattgtggtgtaggtaacacccggtttgagtgcatacgcagataatcctcaacaagctgcagaatctcttatcccacttttagaggaagctgaaagtgttgtccctgaggacctgtaccctactacacccgttaagcttggggttggtgtttcgggtctctatatttgtcactcactggtcacaattaatgggttacttttgaggatttgaacccaaggttttaatcatattactggtcacagttagaaattcttaaaagactttgaatccttatatttctttggtaacaaaacaactcttgtttttttttttttaaaaaaaaagaaagcaatcatcctattacataaaattgataattttttctataggcattatataaggagagaaaataagaatataaaatgaaataatttttttaataaattaaaattaatttatgtacaagttaatttatagatactttctcattcaacttctctaaaacacttatttaaatgtatgtaaaagttaattctagtttatgaaaaatatttaatttaattattttttctagcttaagtattcaattgataagtttatcgtaacatggcctaattaaataatctggtcgatgtagctgcaattactttcatgatatgatttaaaaaataggccacaaaatctttaatattgcagcagcaattgaagtttttaagtatattcatgacttgaccttgaagtttgggtagagactatatatatatatatatatatatatataaagtcatgaatataattaaaaataatgtacaactagttgtcactttaactctttaatagttcattatgtaaagggcctgagtgtactgagtgtacatgtattttcaattttttatgctaatgcaggcgactgcaggtttaaggcttttggaaggggatgcttctgaaaggatattgcaagcggtaactaggatcttcatttcttaattccttataagcatgctttcaatgtctaaagttttcattttcttatctttaggttagggatttgctcaagaacagaagtaccctgaacactcaaccagatgcagtagctattattgatggaacccaagaaggttcttatctatgggtatgaataaccaaactgattttaatttttatgtcatttatatgttcataactttattcatttgactgcacatctataatctggagaaattattaatctaagtatttttcttactctatatggaaatctcagcaattcattaatttgaagcacatctccaatacttcatttacaacacacgtatgaaacgaatagtgggcgatcctctaaggcgactaaagaatttgtttttgattaattttgtgctccaaccatgttttcttacacctcaattttcaaaccttcttttaattatccctgtctcttcatctttccattacaatatcatctattgcatctatttttctttttcctcattttctttatatctctttcttctctcaggtgtatatatttgaagggatgtcaaatgatcattattcatccaccaatgtctaaaattaatccagtgtttgaacccagttaattatactattcatttgattatttatttttttgaattatttattgcagagtcataatactctttatttaaaaaataatttgcaacactttcaagaatgaactcttacaaagttttaatttttcttatgggtgacgatttgggttgatgcactgatgactactgattatactgttatagttgttatatatttgttacttaatcaatatatatacagaatgtatatacacaacaaaagtaagcagatacagacacgggacaaagatacaacttgacatccaagcggatacgggaaaaaattaattataatataaatcatacaaatttgtaaattattagaaatggataaaaaaaatgttaaagtatatgttatggacgattctaaacataaataccaatataacaataacaattatttaaatgtgtatttcgtgagacaaggaagcctagaaatttggctttacatgaaagtttgaaattatttaattcttctcacctggtacacttctgtttagatcattaatttggtaagtcaaaagtaaatttttcgatacactaagtcaaaagtaaattggaaaacaagaaacaaataatagtgaaattaaaaatataaccattaaatgcccgttcaaatagattattagattctttcagtcttaaattgcaatccgtaatcactgctataatctcagtatatatcacgattttttaaggcttcaccattttaacatgactgcaataacgatccattgatttctcttaaacagttgcacacctgtagtgaggagagaaaaagatgagtcctacctgaaagtgtacctgttaaagagaatccaagttcgcaataacggatacatcaactccttgtagccttgtaattaattaggatattaaaatgcaatattagacaataggttatttttggtactgtgcccactgtccactatatatcgttatgtggattaggaacacatatagtagtagtgttttttgtctcttatcctacaacttttttttaggtgacaattaattatttattggggaagttgggaaaaaggttttcaaagacagtaggagtagttgatcttggaggtggatcagttcaaatggcatatgccatctcaaggaacacagcaaaaaatgctccaaaaccaccagatggagaggaaccttacataaagaagcttgtactcaagggaaaggaatatgacctctatgttcacaggttaatttccttcttattcttcgtatatatattttagtagctagtgccagtagatgttaaggtgtacaacttttgagagctaaagctcttggacaatgaagcacttttgacactgacaccaaatacaacacatacatgaacacttgaacacaattaatgtcgaccacaataaagaccctcgagatatttaatttatataattcacaattctaaaacaaagttattaagcttcacaatttccatataatactgaataatgaccctcgggtagaatataccaaaagagatcactcgaaaatacaatctttacaacagaaaaaattctaacataagatgaataatatttcttaaaagctaaaacaactagttaattttttttttataaaattttctaagtgttttgttgaaaataatccaagtttcacgtaaactaacaatacaatacaaccatagaagactttgtcaataagaggcaaccctcaccctttaagttagtttttgggattgagttaagtctaaactcacatcaagtctaagaagtatttgacacgagggacaattcttatccctttaactagtttttgggattgaattaatatttctttgatatgatacgagtcacatcacagaggtgtttgagaaaaaaaaaattaattacaacacgagtgagaggtgtttaacatgtgtcatacacgtgtcccacaagtgttggtacttcttagctcatggatcagactttctaaggctatattcggataaatgttgaatttccaaatttcaatatacatttacgaattttattgtaaaaaaatgaaaaggaattgtttttctttaaaaataaaagtatttttaagttctccttattgaaatctaaacatggaccgagttgtatcaattagaagtctagatagaggtagaaaataatattattctttgatacatggcccatgcaacggctaatatatatatagttttaacatccttctttcagttatttgcattacggtagagaagcatctcgtgccgagattttgaaggtcactgatggctccgctaacccttgtattttagctggcttcgatggtaaacacggattcttcatttcttcaaatgccctgatgcttcttcgatgctaaattcccccatcttaattgtttgggattctgcacttaacagtataattaagggagaaagaacttccgaatttaaataactttttatattcgtttctgtttcttcttttcaagttttttatttttagcatgccaataacacaattgtggacgtttttattccttaaagggacctacacatattcaggagcagactataaggccttcgctcccatttctggctccagctacgatgaatgtagagaggttgttcttcaagctctcaaattgaatgagtcatgcccccatcaaaattgcacatttggtggtatatgggatggtggaaggggaagtggacagaaaattcttttcggcacttcatctttctattatctgcctacagaggtatatatatctaatatttattggataaaatttgttttagatcccataattttaatttaaaatagttttggttattatctttaaaatttgtttttggctttcggccgaaaaatacctggattcacctaaaccaaaataatgatttgaatccttgtatattttataattgtgaatttcgtctctcattctagtattctaaattttttatagagagacaaaatttgtcattattaaaaatatggaaactaaaatcatggagactgaaaattagacacatgtgaaatagggaattgctacggatagtttgagtgatttgcgaggaaatgatgagttactatataagtattaatagcgagagacttgcgaaggaatagctagggaatatgtccaattaatagcgacgaagtaacgagaaacttgcatggaactgttcacgaaggaatgattatagaattgccagggataaacagcgagacattagagaaagatttgccgggaaagagtaagagaatgttactgagggattagcgcgggaaaaacaagaagctatagtcgcaaatttgcgagggatatggctagtttctttcatgcaattagcggaggatttgatatggaaatggcgacacactagcaagggaacattctcacactaatttgctacttggatttagcaaaaggagagtttttctaactaatccttcattaattgttgagaatagtctcacattaaatgtttaacaaacttgataaatgcttatatacttgggtaggtcacctccttatgaaccaatttttaagagaacctttaggatgtttactgcattataaatttaatatggtatcaactgccagccctcgattttgtgatagattagcgaggaactagctagggaatgttctgtccctaacatgcatttttcttaaaccaatttgtcctattttatttaatcatggacaactttcatattttgaatcttcctcgtggaaattctaactacgtcgtatttgatctattagattggtatcattgatctaaataaacccaactccaaaattcatcctgttgatcttgagattgaagctaaacgagcttgtgaaacaaaattggaggatgccaagtccacctatccaaaccttgctgaggatagacttccatatgtatgcttggatattgcataccagtatgcattgtacaccgatggatttggtaagttgcattgtgaagttgatatgtgttgttccaaaatatgttggcaccttcatttaatttgttggccttttatactgacttttatcatattttggcaggccttgatccatggcaagagattacagtggcaaatgaaatagaatatcaggatgctcttgtggaagctgcatggcctttaggcactgccatagaagccatatcgtcattgcctaaatttgatcgattaatgtattttatttaaagcttatgctgggatatttcagtgttaaaggccactttacaaaaaaagaaaataaataaaataaaacttatccgtcttaattcatcccttcattaattcctgcaagtggaatcttagttttgttatatgggtgggttaatttatttttaaaaaccaaaaagcaagccgtttgaaaaaaatcagtgaagtaaagtggttaggtgttagactccacttgagtctctcataaggtaatttttttcccttcttactatgcaattaacatgcaattactccaatttagttcatccccaatatcttgagtaataaactctttttttctaattatgacaaataaagtaactttctaataactcatgcagcgtgttgaatcaactaagtcgaattcatcaatttgaaataaaaagagtaattagccaactttattggcaacaaattgcgtgaacaagaaaaggggctcaagtatatgatacaaattggaagaaattgatttgcccaaagaaacaaccagattgtagtcctaagacttaatttagcaaaataaagaagtaaaaagaatcaaaggtaagataaaaacaaaaaagagaaaagcatggggaaacttttattaaggaggtaaactatagtggatttcaagggggaaattaagtggctcaataataaccaggttaaaaaaaatagcaaagggaagatgctatctttgattaagagactttgagaagcttaaatttgaccaatgttaaaaggataaaacttaaatttgacctatttatccattttagacttttttctaaaggccaaacttgacctgcataaaactttgcatggtctacaaatttgttcaaaagcctattttgtgataaatcttataaaagatgacactttctatttacactgccatgtttgctaagtacaccccatttattctctttatattttttattgccaattgtactctttttatttgttaaaacataattttggaaataactttccataaaaacatgtcaattccaaaaaaatattttatggaactatgttttaacaaaatacacatagtttcgaaaactactttccata

SEQ ID NO: 287 - DNA, 3255 bp, Glycine max
  source 1..3255: mol_type = genomic DNA
acttccattcatttaatttttcacttctctattttcatttctttttattaatcacttatatttaaaagaaaatgtaataaagaaaaaagacaaataataaaaaaaatatgacttaaattttttaaaatatttaataaatgattgaattttattctgaatctctaataaaatttttattattttaagtcttcgatatgttgaaatttttattttaaatttacatcattaattaaataataagtattatcttataaattaaaatttttaaaattattaatgattataatggtatcatattataatgtcatcatttaatttgatcataaagacttaaaacaaaaattttaatatgccagaaatattaaaaaactaaaaaaatattaaaatagaaaaaaaaatatagtctcacaacaaacaaatacagtaattaagtaggactaatcagttcttaaactgtattaataaagcagagtgatatatagtgaaacgagctcacctttttttataagcacgtgtcacttaataacacgatcttttaactgaaattaaacaactaactaaatcacatcacataagattacagttgcagaaaaatgaaattactgtccgttaatccttgcatcgtgcttgtttgtatactttgtaccagagttaatatatatatatatatatatatatatatatatatatttaaaaaaaaaaaggagacagagaaacagaataattaaaggcaacaggaaaaaacaaaaaggtttagttgtcatggcaacagaaatagaaatatccatccacacgtggatctcagtgccgcgcctcagcgcgtgttcattggtatttgaaagcagaaaaagcaaagaagataccataaagagacaattatattggcacctccttccaatttccattatcatttccttcccaaacccaaaacttactcaccatatattcttcattcttctacttccattaattcccctaaattcagaagaagaagaagaaaatgagaaacccatcactaccaacattagcaacaaccaagaccaaggtgaagaacaatagtaacaaaagtaccaacaacaacaacaacattggtaccaactactctccatgctgcaacaatgttgggttgaagcgagggccatggacgccagaggaggacgaggtgttagcgaattacatcaataaagaaggagaaggacggtggagaacgctcccgaagcgcgccggccttctccgctgcggcaagagctgccgcctccgctggatgaactacctccgcccctccgtcaagcgcggccacatcgcccccgacgaggaagatctcatcctccgcctacaccgcctcctgggcaatcggtacacataccatcttccgtttaagggtttaggtttaactgatcaattattcccacaaaaattagggttcttacacttttttttctaactagggtttattaatttgttgtctccacattggatgtggcaggtggtctttgatagctgggaggattcctggaagaacagacaatgaaataaagaactattggaatacccatctaagtaagaagcttattaaccaagggattgatccaagaacccacaagcctcttaacccaccatctattgccgttccttcttcttcaacaacttctactattccaccttctaaacctcctccagtgatcatcaccaacaacaacattaacccttttcatcacgatctcaccaacatgtttaaccaaggagttcatcttaatcatctaggtcaacatcaccaacctcctccactttctaatccctgtgataaccataacccagtaccagctgctgccaccgatgatgtttctgcaatgggtttcatggacaacaacaacgaggattgcaacaacgatggtatcaacatcaattattactccgacgatgtcttttcttccttcctcaactctttgatcaacgatgatgcttttgaggcgcagcagcagcagcaccacgtgcaaacagagatccccacacccagtgagcgtagcattaatccactgccatgtgatgatcgtgtcgatgatcatcatctgggttcaatcaccactgcttctgcatcgcaaggttatgacgatgagcttggggttctgtgggaatcgccactcgtgagtgctactttcagccaacacgttaacgatcacatcacaaagagggttcatgatcaccacaatcaatagtgtctagtactgttgttattattggttaccagcttcatcaaataccaagggttcaaagaataattgtgttgttgtccatcctgtgaaaagatggagagaaaaagtaagaaggacattaaagaaagaattcacgttaaataatattcttgaagctagctctggtctttaaccaagatgaataacgtctaatgattcatatagccgaacttacttagtcggataagttttcattgttgtaattgtgttgtcggtgtttccatatataagttgttgttgcttttgttgtattgaaattttagtgatgtaatttcatgtcatgcacatttaatttgcctatagctttctgcctttgctctctatgcaaaacaacacattttattaatgtactacgatttgtgttttaaattatagtactgttttacatcaatgaattcatgtatgcagagtggaatctagattattttatactatgtgtgtgtctttttcactttaaataaacttcactcttccatcatttaaaagataattttgttcatgttcaatattgatattcttagtgtgaatgaaagaagttttgctttcttataacaatcaaagagtttgcaaaagatattaagaaatatatcaaactctatgaataatgtaatgatatatacattatgaaattatccgttgtgtaagatatactattttattgaagacagaatctaaatggtggagaataaatcaatatctaatggacaaatgaaagcatggaaatgtaaagttctacaatattaattcaaagttataaaatggactaaattaataatcatatgtataactcttcatacaagtgcatacatacatgcatatgacttaccttcaagagcaaggttgatggcataaacatatgcattagtactctttctgcatgtatatatggaaacataagcacactaggatgcggaagttgatatctctgtgtagtttcttgaagtttgcatgactttatattgccatcatgaagaggtcaggtcagcgggtacagctgcacaaa

SEQ ID NO: 288 - DNA, 4327 bp, Glycine max
  source 1..4327: mol_type = genomic DNA
ctatcttctcgagagaacattttctctcttcaccacctccagaagcttccccctctgctcctatatatcttcttcctcttcgccatggcccattcgtctcgtgtgacctttgtcggcatcaacacctccggccaccaccgcaacaccttcgtgtcaccacacctttgtctggccttaccttcacttcgcgtcaccacctctggccatggtagtgtctcgcatcacctttgctggggtcaacaatgaaggacatggtcgcgtctccggtcatggtttcatcttcggcatggtgcgtttgtcgtcacaattgttgcgtttgattttttcctttttctcctttactgttttgcttgaatctagatttaaatcactttttttttttaaatttgatgatttttgggatttattgtggttgttcaacgagtctatacgtttcgtgttctttccttggatagttatttttcctcgtattgaacctctgttttgtgtgagaaaatcaattttttaatgattagatatttgttatgtatgtgaaaatcatttttaaaataggttctctttccgtaagaacatcaaagtttatgattatgttttccctttaatttttgtggccgttatggttttaactttaatgtagcttcaattatattcccaaatgggttttaacttattaaaatagatacatgattactacaccagagacacacacattacactactgaaatgttaaaatattattaaaaatgggatcatatatatatatatatatatatattataattgtttcgaattaatatgaaattcttatcctgcgctcatattatattttgctcctgcgatacgttgttaacttttattcgtaaaatttaaaaatatggttacgtgtcacctaaaaattaggtgggactacatgaaataatttctcctacagaaagtaataaattatataactttatttattgtgatgatcgacgtgtttataatttttgtatgagaatcacgagatcacgatgtgcacactcctatgtttacgctccacaattctacaccacgtagccctcatcaaatcgttttccaccacaagaaccaaaggatctccgttactctcgtttcttctccaacaactgaaagcaaaaaccttactcttctcacttatctccttggcaaaaacaattttggttcagttaattagtttctctctttgcactttctcttgtttccacaaagccatgaaatcacgtcctttgcacatagcaatgtatccatggctggccatgggtcaccaaaccgcattcctccacctatgcaacaagttagccattaggggccacaaaatctccttcatcaccccaccaaaagcacaagccaagttagaaccattcaacttgcacccaaattcaatcacctttgtcaccatcaatgttccacacgttgaaggccttcctccagatgcacaaacaacagcagatgtcacttaccctttgcagccacagatcatgacagccatggatctcaccaaagatgacatagaaacccttctcactggcctcaaacctgacctcgtcttctatgacttcacacattggatgccagccttagcaaagcgtttaggcatcaaggctgtgcactattgtactgctagctctgtcatggttggttacactctcacaccgtctagatttcaccaaggaacagacctaatggaaagtgatctcatggaacccccagaagggtatcttaccaaataccgatactttaatttactttgcgtatccatatatccatatccgatatgtatgtgataccaatactcttgaatatttcacagatatgtgaagtatctggcctttaaatatatatatatatttttttatgaaaattcaatgtagctacatgaaacatagcaacattatcctttgatgaaccaaaaatgaaaattttcgtctttatatatgaatgatttcaagaaagaagtgagatccttgtaagtaataggaaataatttatgatgatagtaatttagtattgcaagaagtatgattttaatttagatttgtagaattgtaatcgtatatttattatgttggataaaatatgtcaacagtctttacacttcagtgaaacttgatgattcaaactttaatttttgatcaatttgattgaagttaaattacgaagactagtaccaaattttatcgcatcctatatatacttttagactgatcatatatatcgtgtctatgcatctcataggtaccctgactcatcaatcaagctccaaactcacgaggctcgtacctttgctgcaaaaagaaaggatacatttgggagcaatgttctcttctacgatcgccaattcattgcattgaatgaagccgatttgttggcatacagaacatgcagagaaatagaagggccatatatggattacattggaaagcagttcaacaagccagtggtagcaaccgggccagttattctagacccaccaactttagatttggaggagaaattttcaacatggcttggagggtttgagcctggctctgtagtttattgttgctttggaagtgagtgcactttgaggccaaaccagttcctagagcttgtgcttggtcttgaactcacaggcatgccattcttggcagcagtgaaggccccattagggtttgagacagtggaatcagcaatgcctgaagggtttcaagagagggtcaaagggagaggatttgtgtatggtggatgggttcagcagcagttgattcttgcacacccttctgtagggtgtttcatcacacattgtggatcagggtccttgtctgaggcactggtgaacaagtgtcagttggtgctgttgcctaatgttggtgaccagatcctcaatgcaaggatgatggggaccaacttggaggttggtgtggaagtggagaagggtgatgaggatggaatgtacaccaaggagagtgtgtgtaaagctgtgagcattgtgatggattgtgagaatgaaaccagcaaaagggttagggctaatcatgctaggatcagagagttgctgcttaacaaagatttggagtcatcttatgttgacagtttctgcatgaggcttcaagagattgtagagggaatttgacttgtggcaattaatatttgatagatgatgatagttttacatgaatggcaatggttttgaggtgatgattgatttgttcaaggctggagtggagcctagtaggtcaattcaactagttcttatgtgtgaaaatttcctttaattttttcttttatttttttataagctaaaaagtttcaatggctagagatttcttatattataagggaaatgttaattaatgtctttagacattaattaaagaattaaaaaaatatttcttttgagatgcatgttatgtatgttttatttttatgttcttatataatatctacaataaatatatattttttattttttaatcaatatttaaaaatactggttcgcaaaattctattaaaaagttgtctatatcgataatacatattttagtctaggaacatccgatgtcaaagtcattgaattggtaagtcgcttcaattttgaagtagataagttgtgctagtttttacacctaatagcattaacaatgtgaactttgatcttttgtgttattaatcattctgttaattactttcaaattccaagctaacatgaattggaattgacaagtccaaacaaaaatagaaacaaaaaggaatgtggtatgatgcaacaataattcatataatattttttttatctctctccactcaattatttattacatgttaatatttttttattttcttttctctttctttgtagtgcaatttgttttataagtatatttctcaaaagaaataaatactccaaagggcaaaaatatgaaaatattaatggacatctattgctctcttctccaatagagagccatatatataattaatcaattattaatgtaatgtcaagagagataaaaaagaaataaagaatatcaatcatgtatttgaactgtttaagtatcataaattaactctctaaaaagagtgttgatatttgagcacctataaattacaaatatttcatggacagatcaatctctttttctttcctcacgtttttcttatcacattataccaaatgtatcaatcacttatctttttctttttctatctttctcaagtatagacacccaaaaaaacatttttccttaaaaaagtgagttggtaaataaaatgtctaaatcgacaagtagatttccatcaatttattattttaatagacagaggagcattt

SEQ ID NO: 289 - DNA, 7685 bp, Glycine max
  source 1..7685: mol_type = genomic DNA
tgaaatccgaaatggaagtgaaagaagggggcaataagcctagtaaaacctcccatccatgatcgacaactgtctttattgtctgttttaggaaccaacaacgccaaacccacttgctcaatttagttttcttttcaatataataaatgcacaaattgctgccagaatcggagtgaatctaatgtcgtatcgcgtgtaaaatccaataaaatactccactataataatattttattattaaaatatactagtagtattgatttttttttgttttattataagaatttaatttaaatatatgaagaatataatttttttatgtttttaatttttatgtattatgagtattattgttgactattaatcaaaattcagtgtgcatatttaattatttaaaaatcaataaatttattatatattataattatgattattatataatttatttacttttttatattatttaatcacaaattattatactgtctatatgataaatcttttaattttaataagaactattaagtataaaataattaaaaaaagaactattttaaatttttataacaagacaggtcgatacaaattaataaaaatctaaaaatgactcttatcttttttgtggatataaatttgattctcttttgatgttactaaaattttatttgatgtggatgatctttttcacgtagattctcctaacacttaaaaactagttgaataattgtaaacttatgattgcttataatttagacttgaacaacaagatgaaattttgctactaatagtccttacatgtacttaacatcctatccaaaccaattacagaggagtgtcaactagttttacacatttttacattaaaaagaaaataaaacaaaaactttagttaaaaaaatgttgattttggtatattggccactcataaaagcttgaactgtagaacgaataatgatgaattgtttaatattttttttttattttaataatcagagttcattccccattaactcccacattcacattcacatggtgctcgaagtgggtactataaaaatgatatctttatggcatggcggtccctggtcacactcacagttgtggtgagtttgaagaagagggggttgggttccttggagagacatgggtgttgttgttgctcacacctcttttctttattttaacccttagcttcattgcttccttccttttgttgccactctttccctttcaaggttcgttgctaccatactcaccttttttccttttttctcttccctcctctgctgtctgtgatgttatcttatcctattcactttcctgcttttaatgtttgtgattcgtgtctgtttgttcctggcaaactatgttcttgtttcactggaaattgttttgtcggctcgtagttgttcagtgtgttaacgtacagtatgatcaattttcttcaaaattgagaataataacgttcaattttattccatcattgagcatgtacagttgtgtgattgggtcgttgttcacaatctacatgatgtgtatttattcacctgagctgtggagattgtttgtatttcatgattgggtcataaaataaattgttagtagttactcaagtcttttgtaattttgtcatcttgagaaggtgttggaagtttgttattatcttctcgaattgttacatgagcaggagggaattgattggcattggagtaaattgattaatagattttaacttgttctcagatgttcttatatgattcagattaacttttactcgttatttttttacatttcaagtgcagtttggggcgaaaatgtctacctcaaggcctagccaatcatccagcaattcggggagatcaagacgtagtgctagggctatggctctggcaactgtagatgcaaaactccatgcaacttttgaggagtctggtagttcctttgactactccagttcggtgcgcatctctggtacagctgatggagtcaatcaaccaaggcatgacaaagttacaacagcttacctccaccacatgcagaaaggcaagatgattcagccttttgggtgcttgttggccttagatgagaaaacatgcaaggtcattgcatacagtgagaacgcacccgaaatgctgaccatggtgagccatgctgtccccagtgttggtgaccaccctgcccttggtattggcactgacataaaaactctattcactgcaccaagtgcttctgcattgcagaaggctctaggatttgcagaggttttgcttcttaaccctgtccttatccattgcaagacctctgggaagcccttttatgcgattatccatcgtgtcactggtagtatgatcattgactttgagccagtcaagccgtatgaagttcccatgactgcagcaggtgccttgcaatcttacaagcttgctgccaaagcaattacccgattgcaatcgttgcctagtgggagcatggaaagactatgtgatactatggttcaagaagtttttgaactcacaggttatgatagggtgatggcttataaatttcacgaggatgatcatggagaggtgattgctgagataacaaagccaggtcttgagccatatctgggtttgcactatccagccaccgatattccccaggcttcacgctttttatttatgaagaacaaggttcgtatgatagttgattgtcatgcaaaacacgtgagggttcttcaagatgaaaaactcccatttgatttgactttgtgtggttccaccttaagagctcctcatagctgccacgcacagtacatggcgaacatggattcaattgcttccctggttatggcagttgtagtcaatgacaatgaagaagatggggacactgatgctattcagccacaaaagaggaagagactttggggattggtagtttgccataacactactcccaggtttgttccctttcctctaaggtatgcttgtgagtttctggctcaagtatttgccatccatgttaacaaagaaatagagttggaatatcagattattgagaagaatatcctgcgcacccagacactcttgtgtgatctggtgatgcgagatgcacccctgggaattgtgtcagagagccccaatataatggatcttgtgaaatgtgatggagctgccctcatatataagaacaaggtatggagattaggagtaacaccaagtgaatcccagataagagagatagctttttggttgtctgagtaccatatggattccacaggcttcagtacagatagcttgtctgatgcagggttcccatcggctctttctctgggtgatgttgtttgtggaatggcagcagttagagtaactgcaaaagacgtagtattttggtttcggtcacacactgctgcagaaatccgatggggtggtgcaaagcatgaagctggagaaaaagatgatggtaggaggatgcatccaagatcatcattcaaggttttccttgatgttgtgaaggcaaggagcttaccatggaaggaatatgaaatagatgctatgcattccttgcagttaatactgagaaatgcattcaaagataccgagagtatggatttaaacacaaaagcaattaatacaagactaagcgatttgaagattgaggggatgcaggaactggaagcagtgacaagtgagattgttaggttgattgaaacagcaacagtgcctattttggcagttgatgttgatgggctggtcaatgggtggaacataaaaattgctgagttgacaggtcttccagttggtgaagctatgggaaagcatttactcacacttgttgaggattcttcaactgatagagtcaagaagatgcttaacttagcactgctaggtatgtcttttttttccctctctctgtcttatccttctatactcttttcttctctttgtttttcaagccttatcattcataagcaaaagcttaaaaaatgagttagtatgtgcctttgtctatttagctgtgagcaactgagcatattatgttccctaaagccacacatgaactttgcattgatgaagaattctgagaagaaaagtatgtcttattgacagtttcattcaattttgtgcccttacaataacttgggaaggaatggaacaccctaggagttgtgttgttatttttattttgggggcttggtggaaggaattgatgcaatttatctgacacaatgagcttgtattcttctaacctgctttccatattttttatttgttgttttgttctgttaactaggtgaagaagagaagaatgtccaatttgagatcaaaacacatgggtctaagatggattctggtcctattagtttagtagtaaatgcttgcgcaagcagggatcttcgagataatgttgttggggtttgttttgtggcccatgatataactgctcagaagaatgtcatggacaaatttacgcgtattgaaggtgattacaaggcaattgtacagaaccgcaatccattaatccctcctatatttggcacagatgaatttggctggtgttgtgagtggaatccagctatgacgaagttaactggatggaagcgagaggaggtgatggataaaatgcttttgggagagctttttggcacccatatggctgcttgtcgcctaaagaatcaagaagcttttgttaatttgggtgttgtacttaataaagccatgactggtttggaaacagagaaggttccttttggtttctttgctcggaatggcaagtatgtggaatgcctgctttctgtgagtaagaaattggacgtagagggcctagttactggggtcttctgcttcttacagctagctagcccagagctccaacaagcattacatattcagcgcctatccgagcaaactgccttgaagagattaaatgcattaagttacatgaaaaggcaaatcaggaatcctttgtgtggaattatattttcccggaaaatgttggagggtactgccttgggaacagagcagaaacaacttctacgcactagtgctcagtgccagcagcagcttagtaaaattcttgatgactcagatcttgatagtatcatagatgggtatgatatctctgaatttgttctttttccccttatttacattcatgtggtgtgaagcatttatcagttgaaacctcattgaaactcaagactagaaagttaacctcattcatgcaactaaactccaaaaacattgactagtataacacaactgatattttgtgtttgttgttatcatgttctgtcgttctcaaggttcttgttatgtagttttgtcatgttttgaacttttgttagagtgtagggtacccatataaaatgttcaattattagcatctttgaaagaaggcatccaataggtatgtttatttttcattcacactgtgctttcaaaatcactctgtagtgctagattaatttgtttgtatgaaattatgaatacacaaacatgaccaaaaatacaaagtttcctcatttatttgtcttggcatcttccataacaattatgtaatctttttttgttttcctgtgtgttcaacagttacttggatcttgaaatggctgagttcactctgcatgaagttctggttacctcacttagtcaggtcatgacaaaaagtaatggaaagagtatccgaatagtcaatgatgttgcagagcagattgtgatggaaactttatatggtgatagtcttaggcttcagcaggtattggctgactttttacttatttccatcaatttcactccaaatggaggtcaggttgttgtagcaggcactctaaccaaagaacagttaggcaaatccgtccatctcgttaagttagagctcaggtaactcttccatgcccgaattcaaaattcatttatttaatttaagttagagctcaggctattagtattcccactttatatgtgatttaaatgccaggaggaaacaatgtgtgacatgaattgatgcatgatcaacacattgctcgcttgtgctatgcaaagaaacttgcattgtttatgcagtcttgctaaccagtgtccttcctaaggacaccgataagggtcgacattaacattttcctttgtttttaaccaaaacataaagaaggaacttgcactataaccttgatttacatctaaataagtgtttattttttgtatttatgtagcataacacatggtgggagtggggtaccagaagcattactgaaccagatgtttggaaacaacgggctagaatccgaggagggtattagcctactgatcagcagaaagctgctgaagctgatgaatggagatgttcgctatctaagggaagcaggcaaatcagcttttatcctctctgctgaacttgcagcagcccataatttgaaaggttaaaagttttggaaaaaagaataaaagatgatgcaaccagcaaaacacaatctgttttgtacatcataaagagaacggagctagaaattaattgcatccaatgtaactctaatttgttcccacgtttcttattaactgcttcttgtaacgtacgttgtagatatgtattaatcttcttcccattccgtggcctgttctttctagagtttttccttatttacttattcctccatcaaacagcaatgatgaatcatttgttgcgaaatgaaacgtagaaattagaaaccgctgattctgtctctcgcttcttatttccacgtgttagccttggttttctacctaacttttatgattcaaattcgatcaatgaccaagcgaaatcttacacttttctcattcttcatatgtaatgtctgtcgtaattaagatttttacaatataacaaaatttagaaaaatactaaatattacaaacttgcaaatgaataaaataaaacttactcgaaattgcgttagtagtgtaaaatagctgttagtcgttaagtattaaagaaaaatatgttaatactggtttgagtaagctcatttcacacggcaaagtaatctcagatgatgataaaaaatatatatattggatttaaacggaatatgtttggcacagaggattagagttggacttcaagggtcagtaaccgcccacaaccgaaagaggaaaatacttgatatttttcattgtcttgccttattacataagtcttatatttacagcaaaattacaaataacagaatttggaattttgcataacatgataataactaatggtggaaatggattcggcaattggaattggcaggcaagcaggggacaaggttgccaagtcagcatcaaggccgttagaggtagtccttgaggtactcaagtttagtggcccataatacctcttagcaagcttcgaataagtacctgaaatggtggactgtcggtgggaccgtaatttcaccatgacctaatctccttccttaaaatttacgtccctgcgtttcttgtctaccatttgtttcatcaggacttgtgacttcaaaagcttctttcatatcacagcaaagacctcctccttgtttttcagaaaatcatcaactgcttcaagattggaggtttcggtaatgttttgtgggatagtaaagggtttcttgccgaaggtcaactcgtatggcgagattcctgaacctaaatgtatcgaggtattataagaccattccacccagttcaagaattttcccgaggacg

SEQ ID NO: 290 - DNA, 3306 bp, Glycine max
  source 1..3306: mol_type = genomic DNA
ggagttcctttaattatgccctcttcatcaggaatcttccaacaaaattaaaagaaagactatggctaagggaaaatggagaatcacgcacgcacaaacagaaatttgcatagtgtgtgcaaacaattaaggaaggttctctacgcaaggcatacaacagaaatttctgcacgtccatggtactagtagtatactaaagagaatgctaaaatgtgggtgttcaagaaacgaagcatttcctagaatttttgccttttatgcttttagtttaataataaaacggcagaagcttgacaacttgcaaaggggagggaggacccacacacacaggattacacatgatgctttttttgacctgatcgagctgatgggagagaaaaaactgggaaattttatatttttaaatattttttacaaattttttcagaactaggatgggatagaaataaataaaaaaagtacacaataagagttgctaatagaataaaaaaaattctttattggatgagaaatatccatgcatccggtgtacagccaatcaattaagaaccgattccaagggccccattctgtgtttatgaccagcggagagagaaagagagtggaaaagtggaaaggataactcgtcacatatcatgactaatgtgatttcagcacaaacatcccagacccaaaggcaattgttgagatgagccgaattaagagacaatatattagtagtagtgggaggacctgcacggatgcacttgatttatttctagccttttttcattttttgtttttcctatagaacttgtattttctctagctaaatctaaattatgtattgcaacatattttaaaggaggggcaaaacacactcgatctaccttcaaagaaacttttaagacattataaatatggagcccacactcccttcttcctcagtaagatcatcaacttgtattcctcacttccttagctcctcctcttccttgttcctcctcttacaatggcaaaaatgcctttagagcctctaatagtggggagagtcataggagaagttcttgattctttcaccacaagcacaaaaatgactgtgagttacaacaagaagcaagtttacaatggccatgagctcttcccttccactgtcaacaccaagcccaaggttgagattgagggtggtgatatgaggtccttctttacactggtatatatatttcttttatctcttctcttcttattccttttcttctttaaagaacaagatttttttggggaaaaaaaaagagaaaaaacttaagctgttgccagtgtgtttctttgttattttctgtaatcatggtcacacggtatgtctcttttattggagttttctttacaaatactgaatcattaagcaaatgtccccctttttcggtgcagatcatgactgaccctgatgttcctggccctagtgacccttatctgagagagcacttgcactggtacttaatataaaaattaactaacttaagtagtcatttattacataaataacacaccacacccaccccacatatattgttataccggtttctcttaataacttaacctctttaaaagttatgtactggttatccatctgatattcacgttagatgtctgtgtattttattatcaagtttgaagttttgcaagatatatgcattcctttcatcacatcaaactatggacagccaggaaggtaataacaaatacttacatcacatgaagaaggtacacacatgcctttgtattctgcaaaagtagcttgttccaccataatcccatccaccctaaaatcaaaacaatctaaaagggtgaataaatctcgaagtctcaaacaaacattacagaactacatataaggcaaacaaccagtaaccattcattcattcataggtatctaacagtcaataattttgttgcaaacattctttttgctgcaggatagtgacagatattccaggcacaacagatgccacatttggtaggttcatatgaaaaatgtgtatatatgggaacttactttgatgatcatgagagagatcactgacaaaaaatgatattcctaataatatgtagggaaagagttggtgagctatgaggtcccaaagcctaatattggaatccataggtttgtgtttgtcctgttcaagcaaaagcgtagacagtgtgttactccacccacttcaagggaccacttcaacacacgcaaattcgcagcagagaacgaccttggcctccctgtggctgctgtctacttcaatgcacagagggaaacggctgcaagaagacgctagctatagctaagtagctgctggttttgccactgcaacaaccaaagtagtattgtattgaataaagcgataaaaaggtacaagtacaaggagtttcagtagtggaagttgatcttcacatgtggcttcaaataacttgcagaaagaaggaagataatcattttctagtttgactagtgtgtatgctatgttttactttccatcagatgttgtgtacgttctgtagtataagtgtactacgtgtattattattacctcgtgggtactactatgaggtgatcttatatatatatatataaagaaataagaggtttggtaggccatgtcgtttcttttcctttaatagtttagggtttggcttcgtttcttctttccttgcggtttcgatcactcagtaccttctctctattggtttttttcgatctcttcacaactaaattacgtttttgacagaaaaaatggtattattaattaattactatatgagactttatgatcagtgacttgtacacactttcgatcttgtcatgttgattatttttcctcaagatgcgaaacatttcactttcagtaatacgaggcttgctcgtctatataatatttatgacatctgctttttgctaacttgatggattgacccttcaggaaacagtgatttctacaccaaatttccagcatatattcacactgctaaaataacatgtgattagtgtgtatggaaactgttaatatgcactcctttaaatgcaggtgtaatcgttccaatgccctaaacatagaagctatgaaataaaatggcgttatgttgaaatcaacacatttccagacacaagcacatttgacaatgggtttatctccgtttagtataataaaaataaaaataagaaaatgataagggtgttggttaagaaataaagagtagacatttttttaggattttactaatcaattcacttaaaaaaatataataaaataattttgttcattgatataaaaaaaaact

SEQ ID NO: 291 - DNA, 3750 bp, Glycine max
  source 1..3750: mol_type = genomic DNA
tatacatgagtgggcatattacaaatattcattttcaggaaagttccacctcttccactttacataatttaagttcattagtttcagattcaatatcaattccatgtgtatggggccacattttgaaggatattaatgtagataccacgaaatagaacttacataaggatttaaaaaagggttacttaaggatagagaggagaataagattctatgaaatggagatttgtagttcacataaactaggaagacaaggtattctaaagaaagaaagagacgtgcaaaagttcataaattctaatttaaattctgtcttttcttccgaatatggacacagattatctctttccggagttagctagcatttaaagggaatattttgctgtgatttggttttaattgttttcttataggaaaaagaatacggtatttgtaacgagttttgaaaatgaagttaaaaaagattttgaaaatgaatcaaattttcaacctgagaatttttaaggggaaaaggtcgtaaaatgatcagagaattagtactagcaccattttgtaaatgcacttgcaaccacagagaattagtaggttaacaaaatctctctaaaatgtttttttattagtctattttattaattaaaacttttaaaataatcaatgaaattgattaattaaatagagagtgtggtccatattaatgcataattaacgataaatttcaactaataataaaaatatgtttatatatatatatatatatatatatatatatatatatatatatatatatatatatatatatatatattatagtatattaaagttttattactcaatgcattgagtttactatttatcggagaaaagaaaacatttcatcgtacaacaaaaagaatcgaccgatcgaggacaactgatcacgaaaaacaaatgaagaatctattgatgggacagaagcaaaattaaagcagatgctaaggtggaaaaatatatatatagggatcatatgcgatgtatagtatacataattgtagaaccccaaacacaaacatcatagtatatagtatctatctaaagtaaataatcatggcacgggagaaccctcttgttattggtggtgtgattggggatgttctcaacccttttacaagctccgtttctttgactgtttcaatcaataatagggcgattagcaatggcttggaactcaggccctctcaagttgttaatcgccctagggttactgttggtggtgaagacctaaggaccttctacactctggtaagtaattaagtagtatatatagtggaaattaatcaattgctagctagcgagtacaaattagtcttaataaataagttattaacagctagtatgcatgctatatatataaaaatttatggttgaatctcaggttatggtggatgcagatgcacctagccctagcaaccctgtcttgagggaataccttcactggtgaatgagttatctttgcttctgtagtctcccaattgcttctgtttttaatttctattaacaaggaataccttcactgatattgattttttttaaaaggcaaatgaattattattaattaagaagaaaacaggatcaaggtcacaaggagtgtgccacgaaccatgcatcaatattacaaatcatcggggtcaagaaattaaaacatatagctttccataaaagcaggatacaccccgtaaccaagcttatattgattataatttgtatccaaaatttatatagcagtagagcctaaatatgctcaaattttataattttttcgtgaacttgtttattgacatatattatattcgtttgttatcaatctttctctctttaacaatgacaggatggtgacagatattccagctaccacaaatgcaagctttggtaagtacaaatattctaagtgttgtgtatatgcttaagtagccgtgggataaaaataacatgttaaagtttcacatcaattcaaattaaagatatgaccaaaataaattatataagtgagaagtaatcctaatcttacaaatttaagattgagttagatttaaattcactttttataattatatatatatatagacacacatgacatgagacattaatattgatgcacagggagagaggttgtgttttatgagagcccgaacccttcagtagggattcatcgaatcgtgttcgtattgttccagcaattgggcagagacactgtcatcaccccagaatggcgccataatttcaattccagaaactttgctgaaattaataaccttgcacctgttgcagcagcttatgccaactgccaaagagagcgtggttgcggtggaaggagatattaacaagttcaattaatgaagattcttggatgccttactccagctgatactttagagaaataaagacagaagagagaaaaatatatatagtaccttaagtaatatgatgtaataaaaggaaagataaataatgataataataataatgataataataataatagatgcttagtgtaatagaatagtagcactatcatcaaataagttagaagagtaatggagaaaaagaataagttagaagttaataaaatctctccttttttaaataataatttagagagaaggtaccatcttgcaatgctagagcatgccattcaggaacttcttcaacagattatggtagcaacggaaaaaaaaatacaaaaagttcatgcatggttcatacatactacagggatctcatcctgtattattgtaatgtacgaactgttattcattttaaacaacgtttgcttcaataaattacatacaatattattaacattttaccctttcaatttttttatgatgtcctttcttttctggctatccttgttttatatgcaaaaactttaacgtgttttattttatcatgaaatacatcaaattttcaagtgaatcaatgatgaggtgtttcttaaactatcttcacgtacgtttgaatttttttattatcagagaaacgtatgtacgtttgaatatgtgctttgctattgtttgtattttaaaagacttttttattttaacaacagcatgtgtacgcaactgagttaggagtagttatcaggtaaaattctcttcatataaataattttaattttttaatattaaatatatagtttattttaaaaattaatactgagtctctttaaatctttttcagtacatacttctctagtaatcatacgtgcatatggatttgatttccatggaaacaatggtgctttaaatgtagatgagtataatctgtaaggagtaaaaagttatcttatatattataactcgtcgccaccctttagtaccgcnnnnnnnnnnnnnnnnnnnnnnnnnnnnnnnnnnnnnnnnnnnnnnnnnnnnnnnnnnnnnnnnnnnnnnnnnnnnnnnnnnnnnnnnnnnnnnnnnnnnaaagaaaatttgaactttaaaatatgtcttaactttaacgtgcttatgaaaaatctttactcaattgaacttttataaatcgactaaaataagtgtctctaaaatgatatgtttggtaggagagagaaaattatatagttgagacccacgaattttgggtatatcaatgcaagaaatggttaaaacttatttagtcagctataaacattttttggaatgcttaaacatgtttcttgaagaagaaaaaaaattccgcgcttagtttcaatagaacatttttaaatagatatat

SEQ ID NO: 292 - DNA, 4779 bp, Glycine max
  source 1..4779: mol_type = genomic DNA
aaaagaaccaaaagtactagaattagagacaataagatatcacaaagctgcccacctccgatgcatgaccgcccactaagactactaagctattttgagaagtagcttctcatagtacacttggtgtgtaatttattgttttacttccaagtttagaaaaaaaatttctttcttctaacgtacttatgatagccaagaaaaagctttagcaaacaacagcataaggttgtgtgtgtttttgtgcaaaaaaaagtaatatttcttaagagtcactactactcaatccctcttttattgtgactctttgttccacttcaagcttgaatatattaaccctcatgattttaacataaatctcaaaacatgggtacccaaggtaccttgcgtaatacactagaagatattactgtaactacgcttaggtttatagaaatgtgaaaatttaaaaaaatacaaaagaacatcaatatcatgcggaaactaaacaattaactatacaaagatagcatacattttatataatgaaaaatctagaataaatataaataatttaaaatttaaaaaaatgtactatttaaaattgactaaaatatgtttttcattttcgtaaatacgaaaatattcaaaattcgtctattcaaaattttcaacacatttttattctcacaaaattgaaatgcataactagtagtgtaaaaaaaaataatacacataagtttggatgttcgaaccttatttcgaaaaaaatgatatattttaattttgtgagaaaaaaacactgaaaattttacagagacgatttccgaaaattcatatttatgaggaaaaaaaatatgttttaacctttaaaattttattttattcttttcgggaataggttccaaaactcacgcgtgctttcaatacataaaaccaaaaagattattttccagacaatagaggtgggaatatcccatcccctcgtccttcactctgtataaatagctagctatgtgggtgttgtagtacaattgtctttgacataaaagcatatttgtgtttataagcagtgtgactcagtgaagtgagttagttaattatgcctagtggtagtaggaaccctcttgttgttgggcgtgttataggggaagtaatagacccctttgaaagttctattcctttcagggtgacctatggtaataaagaagtgggcaatggttgtgagcttaaaccttctcaagttcccaaccaacctagagtgagtattggtggagatgatctcaggaaattctacactatggtaattagttacattaaatagttatcatattatatatttacacacacacatatatatatatatatatatatatatatatatatatatatatatatatatatatatatatatatatatatatatatatatatatatattgctttactaaacaaattctgtttaatttcatcttctatcaaaggtcatggtggatcctgatgctcctagcccaagtaaccctaatttcagagagtatcttcattggtgagtacatgccttacgtatcgttaattagttgaaccaaatttatatataagagactttagttacgttacattataactaacacccttccctctgtggattttatataggttggtgactgatattcccgaaactacagggcctaatttcggtgtgtgtatatatatatatataggttacttttcccattcatttaaaatacaaataactcccttaaattttaagttgattttaaaaagaatattaagaattagggttatctttattattattatgagtgtatataataaaaatccgatacattatactaacatttttatattttttgttaaaaaagcctaacatttttatattgataatatatatttattttctatactaataaaattgtctgttagtatgatttgtcatacttttattacagacttccaatatttatactaaggatttatttaattgttagtcaaagattatactaacatagattaatccaatgtcgtatactataagaaaataacttttcttttatagtaaattgaaataagttattttcattttaactataaatttatttatcaggtagatgtttaattagttttaaattacccagaccgggacaaacattaaatagtataaaaatattttctaaaaaaataacttaatggataattattagtacgtctaatcaagctaaaagtcagcgtagctacaatatacaagcattgttaacccttttcttttttgttaaaaattctcttgtacgttatacttttcctttgaggctttttctttgtattaaagaccctttatacttttctctaaataataaatgaaactttcgtttagaacatagcagaaatatattacaagaactcatataaaacaaatgccaaaatacttaattttataaattatattacaaattaaacaagtgaatgagcgtgaaaatgtaaattaactctataagtattaaaaatatttgttttcgtatgtagaattagttacttttgtgatatcattaaaaatgttatgtgtaagatagattaatatagagcttttatatttgtacaacatttttttaacatcaacactgattttttattttacttgtttatattttgttcgcatattacgtcacaatcacaagattataaaaagtgacatgaatatatacaacacccaaattatatattcaatttgaatctgctattgaattgtatacattgtaatttgtcgacaagtttgcgttaccacaatccgattttggaacctatcacatcatgcgcgaaacactagtttcaagaaaatctcttgtcgtgcagggattggtgtataaaagtattggaatcatttgtggccaatgtttcatgaaatatagtacatgaaatacaaatagtgtgtatatgatgatgcataacatctcatgcaggaaattaaaaactgattccacgaggcatcaaattctagattacatgcgatgagacaaatgacatgtctcaaaagatatacaaatatctaattccaataaaacaaatctaacaccaaaatatgctaaattacgaaaatgcaataccagtatgagtcgtttataaatatgttaattgtgagtttgcatgatttgtacgtatgtaggtaacgagatcgtaagctatgaaagcccgcgacccacgatggggattcatcgtttcgtgtttgtgttattccgtcaacagtttagacagagggtgtatgctcctggatggcgacaaaatttcaatactagagaatttgctgaactttacaaccttggattgccggttgctgctgtcttcttcaactgtcagagggaaactggctctggtggtagaacattttgaataaaaaattattataccaaaagtgcatgtttaattaatgaataatactatatatagcgcccaaataagaaaggtaatctacatataataacactcatgagtcacatacacatgaatatgtaaccgaagcactcatatgtaccactttattttatgtagtactattatatagttatatcaatataaatatagaatattaaatatttaactagtagatcaattccctgatcctccaagtggagctttgggatcatggagtttgtcaagtgtcaacaaaatatttattttattagatatttaatgtattttttttattagggactcaattttttttaatttatcatatatatttaagtctattattcaccggagtccaataaaattgaacaattgaagctgaagctcatgcgtattgggctctattactgtcccaaagtcttgccttagtctttgactcttgtcatatgaccttcaatttcatgcaaagaatctctagggtgagtaatcaattaggtctcaatctttataatgcgcaccatcatggggtttagggtatgtgaataaattcatgaaagctgaaaagatagagagaatcaatcatgaaagatggattcttttgatgcatatatggtggggttgaaggaggggatgacggatgaggagatattagaaagtaagaaaaaggaacgaatgtcttttgtttgtgaaaataacacagagagtgcaacgagaaagataagaacgaaaattggtacgaattattcgctactggataacatctcattatgaagaacaagaaagctgatagaggtaaaaagtatatgggttaccatttcagtaaatggttaaaattaagttaaccagataatcattcattcacgtgcacagaaagaatttggtgtgggtacgtaagtatatcatactttaataaaagacaaatctaaattttaaaggaggcaaatgttaacagattttctttaaaagataaaaagagttaaattaatcttataaaaatatatgcaagttagagataacctatatatagttaaattaagaataaaagaatcaaaaaatgatgctggttgtcctaaggtttatcgcatagcatgtggtacaaaagttaatataaattctaatatatatatatatatatatatatatatatatatattagttttgcgagccttgtaaaatttaggatctaattaatcataactatatccttatctgcacctcatataaattatgctatattaaaaacaccattcctcatactcttgtaaattttaggttatacgtaaaatgtctggcctaattagcaaataaatgagtactttaagtatattaataaaagttagatatcagaccatatgtacatgatgatacccaaaaaaaaaaaga

SEQ ID NO: 293 - DNA, 7843 bp, Glycine max
  source 1..7843: mol_type = genomic DNA
agtaatagtcaaactaacatgataaccaaaatataattttagagactatttttttttattttttttagattagagattacgggtgtttcataatttattggaagactaattttattaatgatatgtgactacataaaatttaacataaggtggaaatcaaacatgtattcattaaataaattattctcaaacatataaaacaaatatctctttacaccattacaacaatcctttaaaatatttttcaaatttttctcaatctaagaattaacatgacaacggataacaaattaaaatattaaagtgaccgattacgcttttattattacttgcaatgacccaattgtacataggacgagtcctaatttgaaaatatattacctattatgctgttactcttgattgggggtataatttctcattctaagcatatttaatctacttacaattggatcatatattgtagattttaacccctcacgagcctttaggttgagattgatttaagtcgagctggattgatcggtctagaaggagcttgattccttggatccaaaataaaattaattttgataaaaaaaataatattaaatataggtgaactatgtattttatgaagaagtgaatgtttcagtaaaaaaaaaaaaatgaagaagtaaattttgaaaagtaatatttttatgaaaagtaatttttcagaaaggtaatagtaattgaaatgatgagagtcaatgcggggagtgaccttgtgagggccatgcgtgtggggggagtggaagcccataccgttgcaaagagcaatggtgaagtgaatcaaagtagcaaaaagcaaaagcaaggtttgagcggagcggaacgcaacgcaatgcaagtggacaaagccaatttattcacccaagaaaccccccaaccccaacaaaataaaataaatacactaaataaaccttaaccgataatattagtataatgatgtaaaattctatagcatttatataacaggagaatttatttgtatttggagagaagaagaaataaagcttatagttatagtgagaagagaaggaagattagttgctaataattaagacagaaacatacgtggcagcttagggttcaccccaagtcctaaaaacgccccctccctacccttcccccatttcccccccaacccaaacgctgccaacaacaacactctctctacaaaattgatggtcccaccgacgagcgggtgtcggaatcggaggccatgaacggcggcgccaccaccgccaccttccgatccatcctcgacaagcccctcaaccagcttaccgaggatgacatttctcagctcactcgcgaagactgtcgcagattcctcaaagaaaaaggtcccttctctttctctctcttctctcctccatgatttccggcacctgaaaaacctccattcccctaaatacattatcatattatttattaaaacattaatcgctcgctcgggatgcgggttttttaaaaattaaatttaacgagaatgatattaatagttaattaattaaaatgtcgaagacacgtgttcgtacagggatgcgtaggccttcctggaacaaatcgcaggcgatccaacaggtcatttccctgaaagcgctgctggaaccttccgacgatgatactcctcctcctcctcctcccgccatgcaccaccgtagccatgctcaacctcaacctcaagtgagttacttactactttcttctttctttcgcctttgcttctggaacctcaaatatcctcgtgtgcttgtaggtgaatttgagtgaacctcctcctcctccgcccaaggctccgccacctgaagaacccgcttttcatgctgctgaagacattcagaaatctgcgtcgtctggggaaaagcctacggaaactaatgacaccaacaccaacgttgctagccccaagtttgtttttctctctctctctctctctcttgatggtttttaatgcctttttgtgtgaccggtatagttattttttaataatttttttaaggttttagggtgtggaatctcgtccaagctagttggatctttgatgttgctttcggtactttgtgggaagaaaatagtgtggttggtaaagtgtgctttggagttcagtgaagagtgtaggttggttaaaacttgaaacgttaaggtttgcttttttaagtggattttcttttggcattagcttggaaaattggctcattgtgttgtgttatttattattatttttttctttttcgtgaggtggaaaatgatacggacggtgggtttttggtatccgttgaatgtgtatgggtggggaaagtggaggaaaagctgttagtgaactagtcttagctcttaggtatgtttggatacatttctccataaacactttaggtgaaaaaaaatagaaaataaaatgagttggacttctactataagctaatgttaaattttatataagctttcacttttaacaatttaacttatcctaaaactgtagtgtatataggttggttttagtttatgggagaagctcaattcattttatcttcttattttcgcctatcatcagtacctataaagaagtttatcctaatagggccttgaaacagtttgtatattcctgcagtttaagaaaatgttaggtgtatttctgggatcatgggttggatctttctgactgtgaggttaggaaaaggtttatggccattaatttggatgtttggatttttctgggatgtattaggtgggttctttgttttttttagcagggttggttttattttttgggtcggggtggggagaagaatgattggaaagtgctaccttctagaagcactaaggatttctgtccaattccaaacaaccagtcagagcatgcgaagcaaatatctgttatttccaaatctagatatccccataactttaatattgttgttattctatatttgttgcattgtgtttgcactttgttgactaattaatatttaattgttgttttttgttttccattcatgtttgaccttatacgattgtgtcatactactttaatttaaaattttctctttagatatcatgattgaggtggagaaaggttcatgcggattaaatacgtggcaaatatcaaaaggaggaaggggaattctttaggtgtagaagtgattcttttaggttttaacatcatgaatttcaagattcaaggagtacaaataaataatagtgaagtttccatccataagtttgtgttggtatctatgtcaagtcttgtttccttattagtagcatccaaataaatgaacctgtttatttgtggataaccaataacccttgatttcagccatggatatgctaggaagtcatatgtcttgttgatatggaatacctgggagattttgctttcagctgcagcaagtggtaatcatacctagctgaaaagaaagctgacatgagtattataattaggtattagggacctggatgaaaaaatagagaaaagaagagaaagatttaatttcttgattaaaatgaacagaacaaaggaaaactaaatctcctccaagggtttccccttgacgaagggtttctgttttcaaaatagaactaatgctcagttttccaaatgataacaaaaacgtaaggaagcctcttcccttgtatccttttttttttatcttattatttactaaccccctctatctatctaactaactaactaactaatattccaactgtccctaactaacttccccttcccctctgccttaacgttaagtgttatagatttactcaagtgtcttcccagattcatgtttaaattaaaatcggctcttgtgcagttctttacaaaaataggagtccaggatagtaagtgtacaaaactttcattatatagttactttccgtatgaatggagcgatttggtaacctaaaatgtcagatagtttaaattcaatacatttgcataaaatatacatgactggtggcaggccagtgttccttttatgtagtattgtccattcatactcttaacattacttacaaatgtggtcatagagggtgtgcaactagtggatcatttgggcaaatgacaattttctattgtggtaaggtgaatgtctatgacagagtctcgcctgataaggttggtaatgatctatcctcttgcatcaatagctggccataatccaataagacttcaccttccaatgcaaccttatttggatttgcaggcacgagcaatcatgcagcttgcaacgagtccagtccagcttactcaggatgatcctttaaatggaaatgcagctgtttggacttctccttgccacttaccgatggataaggatgtcctcgttcctgttgatactacaatccttcaggttgctcaagcaggtagcaagtgggttcaaagattgcttgattttgctctgaagtagtagtatgaagtactttgatgtgcaaggaaatgagtcttcttcagtgcccattgcatcaaaatctggaattcttcaaggaatgatctcatctgatgagcagatgaagaaaatgattgtagcctttttattagcttaactgccggattcaatttatttcttaaaagaggatgcagtgctaagttgccttgctatgtcttacagaaaaaaatcatgaaatagggttcaagctaattgttgctttttattttactatttcatgtgccatgttcgttgagtttttcatgctattggttgttcctttgctgtgcatgttgaaaagtattttgatgtccagtcattaaaatgaccacattccctctgaatgctgattttttgaattatagcctttgagtctgtgtgtcttgaagatggacaagcataacatctttgacttgcttaaatcatgataacttgcataatttgaaattaaagatgttaagatccacatatttacttttgtgatattgctaacttcataattggtgttccgaattgttttttacagataagatggtggagtatcctctgcaatatagggagaaagggagcatagctcgtgatgctggtaagtattattaactgtttggaattttcagtctgctagaacttgttctattgtgaggaaaatttacagaaaatctcgaagtagaaaaataaatttctgataaactagtgagctgaatttggacccatgctacttcccttattgaatctctttcaacatgtcctacccatttcttttcactgatttggcaagtctttggagacccttttttgttttttttcctaggcataccaggtcattattttttttaatcaagaaaaacaaaattcgccaacttgatttaagtctctttcttggataaaacacaatggctttgtttgatcattgtagtccatggaaaaacatgcctggttaacagaacttcctgttctttgtgaatctaaaagcaatgaaatatgataaaatcttgtgggtttgatgtactatatcatcacaactttaatgtcatatttatgcacccacatggcagcataatattcatcttagattgcaagtatctttatgagttacagagaattgtttaaacttcaaagcattgtaataagttttcatacatcaaattcctagaacacaagtattcataatatatgtatatatctgtttcataagatgtagagggtcaggaacaccgaaaagtgtcattgcaacgatatcttgaaaagcgtaaggacaggtatttgcagtactaaactgccatttgtttatagacatcaatttcatccattttgttacaagtgtgtagtttagtgatagtctgctgaattattctcttaatctgccctgtatgttaggggaagattgaaaggcaagaaattgactgggataacttcatctaacttcgagatgtatttgaaccttccagtgaaggtccattcctcaaatgggaattcaagccgtagcagtactagctctccaccacaacctagactgcctctagtttccagtggttcagatcagctaaaggttgcccttcccattgatctcaatgacaaaggttagttgcaatctttcttcaacgttaagtaacaaaaccttttttttccttacaagaatgtgataattagtcttaaagcttttaagattatatcagagaaatataataattgaattgaatctgattgtcctgcttgctgtcttgatatttggggaagtgagatttgcaaaccatctgacaagcagtgggggttctttgtgtgcaatgcttccaagacaaccttataaaccggtgttaatcttttacgactagtttacaaagtataatatttgtggtggtgattaaaaattaaatggtgaaccaagatatgataaaccgtcagcctcgatactaggttaccatttgttaaacaatattttatgtcatagatttatgttgtctcagtgtctttgcagatgttcaagaatgctaaaattcaaactagatagattatgcagagttgggactcgtagatgattgaagagagatgacgaaagtattataactgaagagaccatagcgtctagcagcctactgcaagaattggattgctcttagactggtcaattttagtatatttaactgtttgggcaaatttcttttgtttaggatagtggagtgtcctgcctacctgatcaattttgtaatctaatttcatccttcgggaatatcttgttactgaagttttaaggttttatgagttgaaatgtagagccaggagcagctattttcccaggaatatatgatatgtaaattcatcgtgctgcctcttgttaaatgttaatagcttttgtgcaagccaaactattctcttactcttcttatatcttatgtttgttcactctagccaaactattctcttactcttcttatatcttatgtttgtttactctattggtgctgatttcgattttgtttcatgacaaacaactttagtaatttcactgaacgttgatattttgtaggataaatctgtcacgctatactgccattttttttttttggccacagacagttttttttaatcttttatattgatgtgaagtatttattaattttgtaatgactggaaaatttgagtttaatttatatcttaatttaaaatattatatattttttgtgacaggaaaaaacttgagaaattatataaatgtctaaatttattttgtcacgcgatgtaaaaaagtgatattctggaattttaaacatttatctgccacaaaattagataaagtttacaattgggcgcaagcactcaaacaatctgaaaaaaaaaaaacccgacgataacgatattctttttctgggtggaaacacccgccacacgtacgtacacaggtcacgcgacggaagaagagatggtaaaaaaaagaagaagaaatatatgcgccacaataatgtcatgtggtttttaattaattaatttttttatgtcttgggataataaatatataatgtcactctgaccaattgcaattcagatagagagaacgagccagagtaagaaaggagtgtcattcatggcgattgaggtgagttcttctccatgaagtaatctgaatctaagtttaggacttattgttattaataaaaagtcgtgacatgacatgataggcatggttgatggacgatagcaatgaagatccaaggctttctcaccgtcgcaatcccaacgaatcagtttcattggaccaattagcaggtgagctcatctcatctctccccctctctaattttacttcattctgacgtttctggtgaattttgcagaattgggtgtgttatactggaagctcaatccaactatctatgagaacgatcaag

SEQ ID NO: 294 - DNA, 7075 bp, Glycine max
  source 1..7075: mol_type = genomic DNA
atgaatttctaatgcatgatgggaatgacagatatgaggaatatataaaggtgattcttatatacattgacatggatcggaatctattaacttaaagttattggggtcgtgaaatttatttaatttttctaattcgtgtcacatgtcacgacaattagtggggaacatttatgtatatagaaatttcagaaatttctagcagcgtgataaatataaagattttggcacaataagtttttggatcataatgagtttctatttaatcaaggcatgtaatctattttattatttagtagggaaactgaaaacttagggttgctatttgtagctcccacccttcttagttcttactcttttcaatattttttaaaagttttatataatacctaaattgccctcctcctcaccccattgctcttccgttgctcctccatgtgagttcttgtctttttttttctctggtagcgttttgctgctccttttttcactcaagtgttgccaattaattgacaaaaaatggtttctgtttcatatagaaactatgtttttgttgtgtagtcatacattacggaatctagtttccattaaataagtaacgtgaaaaaaaataaaaggtgaaatatatattgttggaaaagaagctatgaggtgcaagaaccgatcacatggagaaggcaatgaaagacaaggaggagcaatggaagagagaaaatgagaagatggaagggatgtgaaaatgtttgaaaaaaacgaggtgatcagttttaaaatacgaatttagtattttctttttaagaaaattctttcggaaagtcgtgttttaaaacatgacttttatttatttgaagtcgtgttctaaaacatgactttatttcatatcctttaatattttatatccttaatatttttaaaatttatccatttgtaatattttttaaaaattgacccatatatgtaaaatacccgtcaagatctctttattattttgaaagcgaaagcatatcacttcaaacacaatggaatcgaggctattgactaagtataaatagagaagacttcatatcggggttcataattcataacaaagcaaacgagtatataagaaagcataagccaaattttgagtaaactagtgtgcacactatcccatgcctagtggaagtagggatcctctcgttgttgggggagtaattggggatgtattggatccttttgaatattctattcctatgagggttacctacaataacagagatgtcagcaatggatgtgaattcaaaccctcacaagttgtcaaccaaccaagggtaaatatcggtggtgatgacctcaggaacttctatactttggtaactcattaattttgtccaagtactctttttgttgttcatatttatagtgattttaaattgtagtagtaattttttataccaagctagaataatttttgtgagtttttctattgaaaatataaaactttttttaatggagaaactctcaaaaactcttttaactttgtattcaaacaatctcataattattagtaaaaaatttaaatatgattttagtttcattaaaatgagcaaattttatttttaatatttgtaaaaagaaattgattttctttttctttttctaagaatatgacgttattgtttttgaccatccatactactattatatgatatagcatccattaattgtttgtgtttaagggaaggtcaagtaccctctcaagtggacatgtacatacatgtgaggacacctttataatattttctacatcccaaaataaatagtattatttatctatctctttttaatgtattatttatgtatcttaaagtaagttagggattgaaaatattgatatcttattttaaaggaatgaaaatcaatcattttagaaaaattaaaactaaaaatttgctcattgcagaaagtaaagtaaagaaaaccccaccactcattttataggacttaaagtcatacttaaaccttactaaaatttcaagaattgaaatacggatacaagcagttaatgcaatatattcttagtgcaatcgaggatcattagatgttacaatatagtagtagtttctagcttaatccaacttgatttcatttcattttattaacagattgcggttgatcccgatgcacctagcccaagtgaccccaatttgagagaatacctccattggtgagccacaaatttttgtttaaacacgccatgaatgcaaacatatatatgaactgaactatacatttatgagtttttctagcttaatgttgtaatattatacccctatcttctctcaatgtgtcaggttggtgactgatatcccagcaacaacaggggctagtttcggtacgtatatgatgtttttccatttttaaaacctataattttctgtgcttaaagttaaacctattcaaaccattatttttaatttaaaattagtgagttttatttatgtgcatatactgataaaaaaaattagttcacatattgtatttttatgtatgaagtctattactggcttggtctgaacaagtaaataatcatatatcaaaacaagaaaaaatattttaaattaaagtataattgaaccaagtaaaatgcatgctattagttaccaaactaataagcacaaaaaataaaataaaaactgatagaaacatgattgattacttattcaaattcaccctcgcttgtattctgtgtcaaacgcacaatgtttgcttgctagctgtttaatttctttaacaaatggacacatatgctaagtgtattagtgatttatgatttctaattatttaaattgataggaactcagcttttcaaaaacattattattaattatcttaactgacgaaggtattagaaattttattgaacactgattcctaaactcgtaagttttggaatcaagtgtgttatgtgataataagaagatccccattaataattattttactgagtatatatagtggaagggatttaaattatggatattctacaaggttccatcaactttatcttaaaagtttatcttttgtcctttggagcagtacatctcctttccaacaaatgaatgatgttcgagtttatcaaaatataaatgtggtccaaaatattttaaaataatttttatttttttgatataataaatattcttttttattgagtaccttttttaatttatatctataattgttagaattattatttttatttaattatattagagaaaaatgatttagttaattaagagttaaatctccagtaatacaccccccccccccccccccaaaaaaaaaagtagcttaattttaattcattggctaacacaatgtgaaatactaatgttatgttgaaacggtgcatgcatgatgtatcaaagcatgcgttatgcatggatgtaggaatgctaaatgtggactgtgttttccattgactagtaatttgagactaatcctatgattatggtcaggcttagtgactaattaaaaagactctcaacaagtaccttcttcaaggttcgaattttgttttatttttaatttttattgccagagaatccagcttacaatcacgccaacctttaaaatgaagaacagatagagataagtatatgatactagggcatcatattgtaaagtacgatcagcaaacctgatgatgaccaacatacaatcccaattaaaatcggagattattatgatagatatttaagttgtttctttgtttttttttttataaaaaaaatctttatacaaaaccaaatatgcatatatatatatatatatatatatatatatatatatatatatatatatatatatatatatatatatacagttagttatacatgtgtataaatacacacaaacatacatttatttttatatatacatacaatatatagcagatactcaatattgaaaattaatttttgttttgatgtttcaaaaacgtttttattggttttaatcttcatatacaaatattatttttttaaatgcttctgtcattactttgtgataatatatgacatgcatctatatatgttacatcaacaaccatccttaaataacatgtaatgtaacatatatagtcatcgatgcatattacacattatcatgagtgaagatacaggtcatttaaaaaaaaatcaaatttatgaggattaaaactgacaaaacaaaaattgatagacataggttacattaattaagccatatatatttacaagaattaagaatatatatgttttacctgattattaagattcaaaatatgcaaccaaattagccaaattatgaaccatataagcattgaagtcttgtttaatttctctcttccatcagaactcaagtaagaatatatgtagccatccgaattcttaaagtgcatgcatgatcatgtgcaaaaagatgagaagattcattcagttcaagaaaaaagacacaaagcaactactgtgactaaaggagaatattcctattgaataaactaccttttgttggcaagatagctctaaaaccttcataggatttacagagttatagaacatcatagaaaaagcttcataacttgttgaagcaaatttaaataaggggagttaaaagaataagaattagatttgtttaaactccatttccaaacatcttattgaccaaaactcagcatcatatataattcaataaattcatcaccttgacaaaatgtgttctttctaagtgaaaaagaaccctcctccatttaaactttcacttcaaccataccccatcaacctactcaccaaggtaagcaatcttaacatccttctcatctgaaataagaaaaattcctctgatttttttaaagaattttgagatccatcatctctagtgaacccccaatctttccataaaaaaagaaaaaaaagaaaaatattctgcttccatcatctatctgctttttaaaaccagagcttaccagtatgtatgagtgtttctggctttctgccctttgcagtacgaaatgctaagatatttccactgaattgaaattacgtgttcccatttcctatttaatttccttagtttcttatctcttcagttagaggatgacacgtacttaattaaaatcaactctatcttctgattgctattatatttttgaagtattattttttaatttggaagagagggaaaaggacacaagattaggtgatttggctcctttctaaaacgttaggacagcagtagtaggaccatacatgtctgaacattattaatacaataccttatctaagaagaaatatagtactattttatgtttgacaatcaaactgaaatatattatcattgcatgtatataaatcataagagtttaatgagcgtcaaagtagatcaagtagaaatcacatatatataacttttaatataattattataaaaattaataaatttattgatcatataaaattattttatattgtgggtattgtaacgataaatatgcattatttgcaaaggccatgaggttgtaacatatgaaagtccaagaccaatgatggggattcatcgtttggtgtttgtgttatttcgtcaactgggtagggagaccgtgtatgcaccaggatggcgccagaatttcaacactaaagaatttgctgaactttacaaccttggattgccagttgctgctgtctatttcaacattcagagggaatctggttctggtggaaggaggttatactaagaaaaagtactttatattattgaaaaaataaagtagtataagcttcgttgagggtttcagaaatattaattggcaatctcccacactctttagtagtaaatgagtgtttttcaacttaattaaactgagcatacagtgaaataaattgctagctcagttggtagcagcaagtactctgcatatacacataaatgaaactgaagcatctaggttcatttttcttatttgtattatcagttgaagaatgttaaagatatctgatatacgtaaagtggaaaatataactcgagcataagttaaagtgatggagtatttatacttttgcttactatccatgatagtctatgggattgtgctattaacaagtatgatgaaaactttctttagcactaattgtacttaagattagctctttaataaattaaaatcgtttagctagcttatatatatatatatataaaacacgactaggttatattatatgatctaatatatatgtacttgcaaggtatattttatggttatatcttcacttttcaggaaagaaaaaattctctgggaatcacatactatcaagaacaacacataaattttgaataagaaagcactaataatgggaggtttttgtggactatatcttagacacgtagttttcgacttatatataaggtggattcacgtaactttcggatttgtgtgggtgtagaaaatgatcctaaaatgataaggaacatttttacaagtggtccaaaggaaatgaatgaaccaaatataacctcaaagtcatcgagtgcaagatatgaaaaatgaattgaagacggattcctgaagatattgactggaatatatatatttctcttgtctgatatgtttcaatatcatgttacaaatattgttctccgactaattttcaagtattatgaaataaaatacatttcgtctctaaccctaatgtggacggaatattgataaaatatcaattgcataaagtaattagtaattacttttaatgggttcatataaactgcattacaacttaattaacaccgtggtgaaatctgattttttttaacatgaagttaatttatacaatatgatatggtcaacaaagccattgaaggaacatgcatgtgcatcagattttctcatgtgtaccaaaaaaggtttatttcaagatgacatatagcaataagtgaaaactaaaaagccaaattggtatagaaacaaaagctggtctcccattttttcttcattttctgaatcacggatatatgaagtccaataactttactcttttatcggagacttataaaacataggaaa

SEQ ID NO: 295 - DNA, 3753 bp, Glycine max
  source 1..3753: mol_type = genomic DNA
atgagttgaattctcatagtataaatatatgttccgtttgctgcaacgaagagataatgcagcctacgaactaaatgtcgtagttatataattaccgttcaccacaatgaagagataatgtggtctatgtgcacatagtagaataaatgcttaattatttaaagtaattgtgttgaataccagattatgagaagttctgaaatgtatatactttgcatacagtgatttctaaaagcaagtctattttcgttcattgctttcaagaatgttattttaatatcttttgggaaatggaaagattcatgttaaatggtgctctctttcatgtctgcttagtatattatgctctcactaagtccttgtgacttaccccttattttacttcttttctcagatacccagtagtggagtaaccgatttcctgggattcgctgacacacccaggaacttgattatctttttggtaggtccccattgtgtctgatggatattttggttgtaactctagtataatgtagctatagggaccagggtagtactagatttagaggggactcctttattttgggaatgtaaatgactctcctttatagatatgatgatgatgcacttgtgatgttttgagacacttgatgattagtggttataattcactttgttattaaatggatgagatgagatacaagtacatgaaattgtatatatatatatatatatatatatatatatatatatattgtgttctttacaggttaagttgtataggataggctggccagactaaagaagacatagtctgtgcactggtcatgaccaagagtgcgtcatgacaacattcataattttttgccaagaatattaaaattaactttggcaatattatgaaccacacgtttcaactacccggaggttgataactggatccccatcaaggtggaggcattaatcaatgcaccaaatctggtaatcaatccagacacgaagcattatctaatataccaaaactggtaatagtccactctataaccaccattgatcatgcaccgtttgagcaagccaacatccataaggaacttgcagaaacataaacaaaaaagatgtcttgtgaagttgtgaacaatgatgagcttcatgtggttatgttcccattccttgcatttggtcacattaacgcatttgttcaactctccaacaagttgttctctcatggagttcgtatcactttcttgtcagctgcatccaacattcccagaatcaaatcaactcttaatctcaatccagccatcaatgttatcccactatacttcccaaatggcataaccagcactgctgaattgccaccaaacttggctgcaaatctcatacatgcacttgaccttactcaacctcatgtaaagtcccttttgttggaactcaaaccccattatgttttctttgactttgcacaaaactggctcccaaaactagcttctgaacttggcatcaaatctgttcgctttgcgtccttctctgccatatctgattcttacattactgtgccttcaaggcttgctgatattgaaggaagaaacatcacttttgaggatcttaaaaagcctccaccagggtatcctcaaaactccaacatttccctcaaggcctttgaggccatggacttgatgttcctcttcaaaagatttggtgaaaaaaactttactggttatgagcgagttttgcaaggctttagtgactgctcattaatagtgtttagatcgtgcaaggaaatagaagaatcctacttagactacattgaaaagcaatttgggaaactggttttgttaactggtttccttgtcccagagccatcaatggatgtgctagaggaaaagtggtccaaatggttagacagtttccctgccaaatctgtcatactatgctcctttggcagtgagcaatttctgaatgatgatcaaatcaaagaagtggccagtggcttagaactcagtggcttacctttcattttggttctgaatttcccatccaatctctctgccaaagctgagttagagagagcattaccaaaagggtttttggaaagagtgaagaataggggagtggtgcacactggttggtttcagcagcagcttgtactgaaacactctagcgtgggatgccatttaggccatggtggcttcaattctgtgattgaagctctggccagtgattgtgaactggtgctgttgcctttcaaggctgaccagtttttcaatgctaagctcatagccaaggctttggaggcagggatagaggtgaataggagtgaagatggggactttaagaaagaggatatactgaaggcagtaaaaactatcatggtggaggatgataaagagccagggaagcaaataaaagaaaaccacatgaaatggaaggagtttttattgaataaaggaattcagaacaaattcatcactgatctggttgcccagttgaagtctatggcttagtgttcaggattcggatttcttggactataagctatcatttaaaatttgaactgttcgatcgtgtattagttgttttgtgtgtgaatgtgtgtgactagtttggtcagtgctcattttcttggtctattctcttccaatattaatgtaaaataaagtctactaagactaatccattttcttagtctagtctcttccaatgtgtctcctttctccagattctactgtagttataataagaccagttagtgcatgaattctctaaacaaacatgcagggtggataattcaccttagaagtttacatattgctttatgtaaattgagaatatcgagttcctaatggttgaggtcaaaaggaattgaatgcatccttgcttaattgaaatcaaggggaaggctggcttgtagtttttgcaaaaggtttgttttgaaaatttgaaatgcaaataaataaaaataaaaattgtagaaccattctattgtttgaaatatacaaattaatggtttggaatataggatgaacaataatggggacataaaaatgtcacaatatattatttttgtaagatcctgctttagttttaagagtaagcacgtggaaaaactaaaacaacgttgaagtacaaacagaaatgcacttttcctttctcgatcagaatttttttataaaaaaaagtccttagtaaatacaatatactaaaaatgattagatggttcatcagccaattacagtgctcctttggtagtcactagagagacattctgagtgatgatcatgttgtgatataattcaagaggtggttgttaaagcagtaattcagtttagttgtgagagttcaatataaataaacattgtatcaacgttgccatagttaggtcttattataatttattctttttcttattattacaatgtgtttttgagagtttttcacaacaaatcgataatcagagctctcatttgatccgataccagcatacttttgcagtgtggttgaatctgagaagatcagtactggttatgactggtggaatggaaactttcctgtgaattttacagttcttcactgaaagaattaggaaagagagtgcgtaaagatgaaggttcctttaactttcaaattttgaaattcaagcaatataatatcaatggaagagagagataagtaaaaaaatgaaaaagagatagaaaaataaaatagatcacatacacttattttctcttggatttttttcttcttatctctcttttcttattacatcaattc

SEQ ID NO: 296 - DNA, 14794 bp, Glycine max
  source 1..14794: mol_type = genomic DNA
aattaaattacctcctgcaattcctctgagtttggggattcggcgataaagcggcatctggccaccttcgaaacccttcctaacgccaggtccagatcgagatttctgacctctcatcccaaaaccacaacttgccccttgccctgcggatattcctctaccctttctcttagccctcttcctcgaacccggttgcggccccaaattgtccagccgaaaccgaacgccgacgctgggtgctgtcacgggggaagatagagaggcagccttgttaaccacggaaatgaggggtcttgcttgctgaatcttcttcagccatggttttgcgaccaaggttttcaccgttccctgcaatccccaaattggtgagaatagactagggagtttgaagaggaaaaaacagaatgaataccttgaaaggagaaagtggccgccaaggcaaccaggaaactggaatcagagaagcactgcccatttctgtgtggccgattgatacactcactcacactcaccaacagaacttcaaataacggataggataagtttttcactttctcgccttttctattattattaggaaaataatatattaacttacttctatcaaatatcattttttttttcacacaataggtctttttcgtagaagttaattctgtttgattattttaattggacaactatagtgttattgttttatctctagtttcagagcatattattattaatctcaattatgtgataattgatattaatgtttaacgatataggaaaattaaattttattcatatagctaattgtgacacaaaaaaagtttacaaatagcagaacaggagttacataggataaaccttaatgcatacatgaatcccccaccaaattttcacattaataacaaagccttgaaaatagaaaccctcctttatcaatattttttgccggctacaccctctcattctacgcctgcaacccttcccaacccaacgccctctctctccaatgtcctcttcaccatggtggtccaacccctccgacatccgctccctcctccttgactccgccctcctccccaactccgtcgccgtcgacaccatgtttattgatatagtgatatattgatgtgtcagattcagtttaaacttattattgcagataagtgagctcattttaatttaacataaggagatgttactatttcttttaaccctgtaaagtacctatcccaaaattaagacattgtgaaactttacacaaaattaatacattgtgaaatagaaataatttttctcttcactcacaggtactatagatccaacgtcatatgcatatttaggtaaatttgaatctttagtattatacatgttttaataagggagttatattgatttagggattcatttgtttaagaatctccttgtatgttagatttataatttatcaaatactaccatccgagataaaactatcccttataatatttaaggtaactttcattcaattggtgtggtagtatattattactactttaataataaaaggttaaaatgtgtttttttatatatattaaaatgtctgaaatttattttgtctcttttaaagttgaaatatgtgatatttttttacttaaaattaaatttggacaaatatgaatctttaagtgtctacattgtgtcctttacttacaatttatatatataaacaaattaattattagatcaaaattagttattacaaaatttattatgtaaatttatatgtgcattaaatatatattaaaaattttaatgttatatataataatattaattattctataacataattaatttattaactcagttgattagattgttgtattaataatacaaaagtcacaatttgattattgtgtcgtaaaacatatttttgaaaattgaaattacacatgttgtctagggtgttccatcaatttgcgctgggtgcggaaagaaaaactcttgcttcatcagctgtatatagcccaaccgctacctctttcccttgattgtcgttttgcgtctacctttttttttttttctttcttttccggtgcgttgtgtttactttagttactactccatgtgctgttgcttcctgcacctcctttttttcttctggtatagccaatccaaaatataaaattacatttcagaatgaactccttttttgaattccaaaagttaaaaaagaaaaaacaatataaaaaggtgcagaaaacaacttgaaggcaaacatgatccataaaaaaataaaaaaatataatataacatcaacatataaactaaaagtaatattgaaataatttttcaagttcatttatataatttataataatcaatttacataaaaaataactacacatacatgacaaatgcatgaaataataaaaaatattttttaataataaatgagtatttttagggtggatagtatgattccgcttctacccagcatttttgtcatcttgttgttcatatggaaaatgaactaatatttgcctactccaaaatatgcgcattcccgtgaacttaaaatcaaaaagatatttctgtaaaaaaaataatatatcagaaagacataaactgataaacagaaaatgcaattttatttcttaagtttcgaatttctgttaaatttacaattgaatcatttttagcccatattttttactagtcgatctggatctattagtaagctaaggcattggtcaaaatcatgaattcttaaggcccgatagttaatattctgacttccactttttctattcacactaccactttttgaaaagtagtaaaaatagacaaaagcatccctctgcacattttacctacccctttcccttcccttttccccattcttcttaccatcatttttccttccccctatatttttttttcattttttatacacaaggagaatacgattttgttgtgttctagattgagaatcacaacaatcataattttgttctatttttttgttttgaaaaaaatactatgatgaaagtacgattttattgtgattttcaacctataataaaatagaatttcacttccgttgtgttattttttttttttttaaaaacaacacaatgaaattatgattttattatatagtgggggtgaaagtaaaattacaaaacaaaattatgatttcgttgtgttatcttgaggtgatgaaaaattacacaacaaaatcatatttttgctgtgtaattagggagagaaaaaaatacataacaaaaatataattccattgtgtacttgtccaatgaaaatataattttgttgtatattttttcatcccctaattgcacaatggaaataagattccataggtagtacataatggaaacacgattctaattattacttcccacaccacattatattttgaaaagtccaaatcaaaatacaatggaggcaaaaaacaataaatgaaagtacatggctcatttatcatattataaaaaacccatttaacatgtaaacctagcaataaaatagataatttagagcatgctagggttaacacttaatttgagaataggtttcattttgcaagctgagtttgtaaaaaccttagtcttacttttatgaaaacttggtttcaagtaaactataagtatgcatgtgaaagtatctcttagattaatcaaacatgttacaaaactaagcgtactctctaaactaagtttaagacatcccaaacgaacaaaaccaaactgaaccttgaagatttgttaagttgaataccataattattattgataaaactccgaaatttaatcatataaagttatatgttgatttattgatatcgtgttattttaaaaaaaaaaatgcctgaagagtttgtagggtgggcaggtatgtcttggataagagttgaaacacattttttattttgtgtgtgattatgcttatcccttatcgaatacatttctttcttttgttgaaattttttttagctagtttcattctgccattattcttaatcgaggctgtataaaattaggaacaattatatgttgtccgtcttttatttgaaaagttcacaataagaagataagcaacttatcttaattacatttctttgcctctcagacatcatttgtcataatgaaatgtgattcttggaaaagacatagataaaaccaccgagatcagtacttggattatatatgtagtctctgtaataaactaccatacttatgtgagtcctcttattagacattgaacaggtaaacaagagtgtatcataaactagggatataggctaggagaagggtaacactaacacctctgagtgttggtgtgtgtgccctcgggccttgtgagtgattatgctatgtgtagcttacttagagcataccaattaagggtacttttcggagttggtcatagtactcattttgagtgtaaagatttaagtggtgcattgtctaggcagccaaatcaatgcatagctagccaaaatagaggctcgagattagtttgatgtacaacaagtaggaaaagatgccttcacaccaacccaatcttgatggtttagttttgttaggctctactgtactatgttgagcccactttagttctttgtcggcaaattaagtctacgttagttatttgtggttggtatggaactttattgagaacaaaaaggccaagaggctagtacaaattagctagtctttgatgtttgaactaaagttcgttgaaaaaaatacattaatcttttatgtgccaattttctttttttttaatataagtttgttccccgttgggaatgaaggcaagctacaatcaagaagtgagggcttctggtaacattctggtgaaaagaataggagaaagaaccgagagtggatccaaaagcatatagacacaatgcacgagttctacttttctaagaataaaaaaggctctatatgcaaatggaaactgcaagctgaaaaatcaaagtaactatacagctattcaatcacagaaagtttgaagcagctgaacccatgatcactcttagctagtggcaagcatagtacgtattccagagctatctgatgagaagagtgaacaataactagcgacatccatttttggggtctgcatatataagaccaatcaccctaccatcaataatttggcactgattcgattaactaggtgaaccagtgtagtgtataattgatggaaattgaatgctaatagggtgggatgcagacaattctctgattcgtcttctcatcagcaccaccacttggtacgaagatagtgatgtaaccttcattggttgcatctggtaactaattgtttgcaagtcatgagtaattttccttggaaaatatctgtttctttacttgtccctcaaaaggtccaagtccttttttgttttttatccttatatgtgtctcaaaccactcacaggattcaactaaatttgcatatctttaggtctttaatcatttttatcatgaatatcttttattgaaaatgattttcttgtgtgttatttctacctttgcaagttgagaagatgacaaggaaacaaaaatcatctaaaattaagtggctagaactaaaagtagggcatcttggatatgacaagaatagtatcaaatttgctctaaaccgttcccgtaataaaactagatctactgtcaatgagctaattagaaaaaaaaagcaactaaaataataagaaattaagaagggaattacaatgagttatcataaaagagtaaggttgtaggcatatcctagaacatcgctaatgagtatctaaaatatcgaacgctacgaaggtaatacattacacagaacttggaccataagagacataattaaatcctcctaaaatttttagggataaaaactttattcctataacaaattttagcctttaccattgatagtgggataattttttttatgcatcccctcccctccccccacctcccttctaatcaggtatgttttccagttttgtagtatgtgtcttctaaaaaccttttccagttttgtagcagggaaagaaaattaattggattcactaacaaattaatatttgtatttataaaaaataaagaatcatttcttcaaattttatttccttgtcaactatttttcggtagaaattttttggggagaacaggtattacttcaattcaaggcaagaaaaagttgttcgattcaaataattatcaaaaaaattatacttatctcattttaaggaaatgaatggggtctcaaactaacaacctcccgaatgcataacgaggaaagttttattcatccttaaaaatattgatatttttattatattcatacaacctggagttagattttgtagtaagaaagttgacttattttctacaaaaaataatatttgaggtttaaacttttatccacgtaaaaaaatgatttaaagattttaaatgtatctaataaatatttttttaaaagtcttatgttgcttataagaaaacatatgtaatagccatgaatatttttaatttttttatatagcaggaaattaggcattatctcacatatataactaaacatatgatttatttttgcttcgttttactttgttatttgttatgaaaatggagagaatattaccgaaaaatatcattagagaatatatgtaatagagtaaatttcacttaaattgtcaatacataatttttttttgtaatgatttatttataaattaaaatcagtttcacctttttcgaatccaaaatataatttctttgtgatatacaagattttttacatacaacttttattcataattaatttactaatttataaaattcttttttaattcaattcctaaaaatacataaaattatttattatctttattactcaaaaagtaaataataatatattcaaaacttaaaattcataacctgaagcatatttatattatattaaatactcactaagtctcttgacaattaattaatcatacattaaaacctaaaagaatgcattgcactaattaactagttgcgttgaaaggcatttacttaaaattgtgttttaattactccaaggtttagagatatttttttataacttatgaatataattgaataaaacaaatcgggagcttatctaaaataaaataaaaacaattgatcattagcattgttgaatttctcccatcaatatatatataataagaactgcacaaccccaatcgttcggtggtttggctaggtcataggcaacagagtcatttccataccaaaacaaaaaaggcttgctcgttattaatatgtgaggtccttttctttttcaatattctagtaatgcattcacattgtattttattaatacaaaatgtctacggaaaggagctattttgtgaataacacaagtgaataaaaaagtgataatttaaataaaatattgtgtcaaataagttatagtaaatattcgttaatgtagtgaaaaaacttctttcttgacgttcaaacaagttttaattagtaacattttaaaattgccttatcgatgttcacggccctaagactgatcaactagtcaacaacttttccccttctctttggttttataaagagattaatgagcattttttacactgaattaaatgtaaattatttttgcatgatcgattaagtagttattataaaaattaataaatttattatatatgttagtgtgtaaccgaatgataacataattttttttacaatgttagtttatatattattttctcttcggattatgctgtacagtatttgttgatttcgatttgtttgtagggtggagttagttctattttttctaacgcaatggaataaaagttaaaaatttgagagttttatttttacttctataatagaattattgatgatcgaacttaaattctcatgcatattattttgctaaactctcacgagatcaacttagtggatataaatttggagaaaatttaacacaaaaattactgtttttattcttaattataagatattattaattaatttatgcttattaaaaatgtttgttaatttaattattaacattaaatttatctataactataatattttttaaatttatccttataaacttatacatcttcaatttccatagaaaggaaaagaaataatttaggatattttaattaaaaataattaatagacaagataattaaaataattttataaaaaagataattttttctctcaaaattatgttttataaatagagaccaaggggaaagttaaaatatttagacaaaacataatagttaccattttttttttcacagagttactacaacttaaatgatagcagtacaaattaagcaaacaataaataataataatataacgattcattttggatatacatagtctatgctacccgattttaatgaaaggtgctgtccgtatctgtgtaaacattaattaatctatctttttagtcaggtaaggcggatcatttacgatggagcagaagattcaaaaagatatttctcagactaaagataatcatatctcaatttgcacatcttgttatttgttcacggctaaatcaactcgttaggtacaaattcaaactaaatggtcaaaggtaatccatggactttcttcacatgcttcggtccatttgtgtacatatttttatttttataaagaaacattttaattaattaaaatatatattaaaaatcattattattaaatagaattctcagtaaaaaaaatagtcttttccataaatttataaaattagcattaaaaaatgcttattcttagagaaaaaaaatcttatcctaaacattttaaacattatcacaaatctttgataatgatttatttttcatacgaaataagtgttttttcgagattccttttaatattggtcccatggtggatttatattgttatgaactacttactactacacttggcgtcaaactttaccgataaaagaagaaacttttgaattgtttataaatagttaactatacaattatagacagggtaattcggtttggtttcaaagaatgatttgatttaatttggtttgaaagttttgctagtggtatatttactgttggttccccgcctcatgtatgtttagagttgaaagtcgaaacctcttgagattgcatcatttaagcgcttacagtacccctcggctcaaatgaatttgtcaggaaacttttttcctctaatacatatcaccataatctgatttgtagtaccacgatctggaacagatattctcctccccacgtttttatcaatagaatccaacactccttgtaaatttgaaatatgaaagttttaatacttgatgttattttggtatttctcatggtctaaaactcgatctcatgtaatttacaatctttggctttgtttgtttcatttctttgcctaaaatataattaattgacgggtttgatttcatgcactttctgtcacaaggaaaggtaacatttaaaagttttcaattttaaattttgactgcttgaagggaagctaggtaggaaggcaacatgatgatgaagacaatttcctctactggtttgtaagtttgccttgctagagttctgaacatggaagaaatgtttgttggatttactgcttaaattcgtgaaggaccacttgaaaagtaatgatatatatacacacacttgcaagaaaaatttcagataggtggggcgcggtcattgcatgaatctttgggtctaggttttgaaaatatcgaatgtgtctcatatcatttccttcataataccaaccagctagtcaaggccagctgcagtagtgtggtccatgaatatcacctgattttaatgcctagctagccctcttattaggttgtgtcttctttctcctttatatccatttcaggtgtgtggtgggggaagcactgatcagcttgtggacaacatcagcccctctaactattgtttctttttgccatttacacatatatgctgctccaaatcaagacccagcccttaattaccaagtaattaaaacagctggtaattattattatttcaaccgttaaagctagctagctttttgacctgtactagtagtatgtatatatacttttctctcagctttaaactagatagtaatcaataacccccaccactattttttaaaaaaaaaatgtaaaacagttaattgcttctgcatattaatttggagaacactttgttttacctagctaactagttaactatcttataaaggaatcactcattagagatggagctatagtgtttggattcaaagaaaacgcatctaaagccaacagagaatataatgatgaatgtgagacatacattaagaaaattcaagttcatatatttctccacttttttcatgaaaaggactatgtatatgtaatctatgagatatagcaactttcaaagaataaaacaacaagtggggggtcgagtctatctcagcttagattgcaaaaaaccctaatgatagatactgatagcaacccttccttgatgcaagtctaagtcccctgggtagaattttacccccagaaggaggcattgagctattgtggaccatacacgaactgttctcaaacatgccccccctctttaagcacaataaccacgcaaaatgtctacgtaccctatgccttgtcttgctttctttctggtataaatgtcatctttcattcttagggcaacctttaatgctcaaagatttgtactgtacatttgatggacatcctttgttggtaaagattttcttttgagatattaattaattatttttttcagtgtatttgactgatattgtttgaatatttttggaccctttgttgatagctctagctagggcaaaacaaaaaaaaactagatgcagaagtatcatatatctatgcaacatcatatttttgcaataaaattatataataactagcataaatgaaatagtcattttttttatatatctcttcatcatataattcactttatcacatgtttctttttatctcttatttgttgtatatatttattatattaatataaattctctatagattactaaataggaataattaatacaaaagcaacatgtttccgaatcacatatctttgcccttttctaattctgtcctatcatttcccaagtctcaaccaaaccagattaagttaagcccccccccccgccccccccctccacactcactctcacactctctttttttaaagtcacgagacccactgtccaattattcattcaatttttgtgtgggggggcggggggagataagagagagagagagagtggcagaggaactgatagagaactttcaaagctctttatcttctaccatcactcaaccagcctctatattgcagtctcaaactgaaagtctaaatttttttgtaaaaagctttagttttatccctacccccaccccatctgaaagaaagagtgtttgcctcacatcatttttcccctttctgtctctctctctgtcggtaccatgtaggtcttcccccactactacaccttcacacccttcttttcttcctcctctttctccttctctaaaccctttaactttctctctcttatgactttgttgttcctttacaggagaccagaacgaaaccccttagatcttaacaatttgcccgatgagtactctagagatggcaaacaagtcctcgaagaccatacctcttcatccggtaaacttcatgatcataccaatatatatatatatgcacgctgaaatatcaaaggaacactttttttttctttctatttaccgaattctatttcacaatcacacaccaccatgggaagcctttcacttttcacaggaaacaaagttgaacactgcccgtggtttgttacccatccctgtggtatattccttgaccatgaaacagtgttcaccacacttttttttcctcatttttttattctttttgttttgtccttgtatacgtttcttttctttttttgtttcttctccttttcctcttctacttcgttatagtatctcttaaaagttatggaaaaaataaaataagaaaaacataaaagtagttaggtgatagaatagaacttaaaaaaaagaaaagtagttgtttgggggcgagcggtaagttaattaattgaattgatttgatggaggatttgggtaatcgagaatggggagttaaaggcaaagaagggtgtcatggaagttgctttaattggatggttatagttgcaggttgcaggaaaaagaaaagcggcgggaaggatggaaaagacgagtgtgggaaggtctacgagtgtagattttgttccctcaagttctgcaagtctcaggctcttgggggacacatgaaccgccaccgccaaggctagtaccacctatattattatactttatattttcttcctcttttcttttaccactccttctcacaagaaccaaatctcttctggccgttaatgatttggccatgaaagcttgtcatttcaatcacaaaatgttgtgttgttggattgctgaaattcgatcatcgagagggccccttcagctgttttttttttttctttttgctttgctttattatttgtttttgtgattgttttgagcagagagggaaacggagacgctgaaccaggctcgtcaactggtctttcgttgtgatcataacattgctgcacaaggtgcccctcacttagggtatgcacccattacttccatgcagcgattctcttcctatttcttcttcttgttcaacatttatatatttcatttctcaaatacttgtttttctgtgggttctttagcgtttgttaacgttgttttttcaaggtataacacataatatttgggtactcagcatgacactgtttgatactgcgatttatttgtgataatattcaattcagatgctgccaaacaataggaacggggggttatcatccctcaggagacccaacagtgcctctaagattcccaagatacttctcaggttcatcctcaactcacatgccaccatccccgccaccgccgccgccaccgcaacgaccatacctatacccttcacctacgaggccagtgtcatttgggtcatcacacttccctctccagcatgcagtgaacgattactatgtgggccacgtgatgagtggtggcagccacggacactatgttggaggagagagcacaaggagttacacgtgcattggtgcaccggtggggcaaggtggcggattcgctggtggtaaggaggggtctgcagtgcaggaggaagggttgagtacttggggaaggggctattcaggtgcacaggatcgtttggatcctccctcagcgatcaatcggtttcaagatggtttctaaagagatgagagattctttgtttgagtggtttttggtttgtgttatgtttctgttatgttatgtggtatcatcataaagacacgcaatccagagagagagagaggtggtttttggtttatctacagtaaccagggacagcttttgagctcatggacacgctcagctactttggcttggagttgtgggtgggatttcttctcaacatcgccttttgtattggtagctagctagctagcttggacaaccagttagatttgaactgaaactttccaaactccttttcctttgcatgccaaattacaaccattttccttctcagtaatttgttctttcaatatccttctattatattacactagtaactagtaagtaatatctatctctgttactattttatatatacatccttctattttatatatgcctgtttttgtgtttaatttgctattccaaaatctctaaaaccccccgtcactctcgatcgctctcactctctctatccaaaccaaaattgggatcttctagtttcttgaaatgttttatggtctcactgtcacactatgctagcacaattagggtaatgacacagaatttttggagtcctcttgcgaaaaaaccatcttgctgaattaatgcttccggaataggatattcaaacaatcaaatttgccaaaatatctaatttcttcttaaagaaaagctttatcctccctccctatttctacgatattgtaaataattattttaaaatgttaaaatacagatcgagattatttttagcagcagacagtgaatgcagctatatttaatttgcttggtacataccgaacataactactatctaaggaataaaaacactcttgctgtcagctccaagagcttctaccaaatgcagcagcttagagaaatatatacacagccataactagctcatgatcgttcttgaaacagtaaaacacgtgtaaataatgaaataatgaaaccacattattagcatgatttttcttttcttttctcttgttttcaatacttttatttaccgactagttctctcctctctgttggaaatggatatatttttctttgtatataggttgtgcttcctttacgcacagtaagtgaggattttattataagtaaattatcctcataaaaaatattttaaaaaggtatattctggcttggcttctactattcctatatatttttggttcgtgttatatagtttagttcgtgttttcactcaaggagcattaattccttgactcaacaaaggcaaatctgctaaaccattaataagtgatgaaatttattttttctagggatggtaaaaatggtttgtatcgtatgaaaaggaaaggcgatgattagtgac

SEQ ID NO: 297 - DNA, 3042 bp, Glycine max
  source 1..3042: mol_type = genomic DNA
aagaatgatcgattgaatagcaatataaattttctcaatgcatatatagtatttacttttacttattataccatcccacttttttattttattttttctctgaaagtgttttgtttctttaaatgaaaaaagagaaatttttaaaatttaaaatcaactagtattttttctatttattatacatgagtaaaatttattttacttaattgaaattcatcataaatatattattttaatatataaatgatattgtaattaaaattaataataaataaataattttaatataaaaattataatttgaatttgcaaaaattaatttaaattttgatacaaaattattttaaattaccaacaattgttttaaaaattaaatttcaatttagtaaaagaaggtaaattgatctcaaacataaagataaaggtttttgtctgtcatggtatctctcaacttatcctgtaaaaaattaatcatgttgtgttacataaatgtctttggttcaagataagagaattttatatataaaaggagtcaaatacaaaattttcaaattaaataaattattttttatatataaacagaaagaaatcttacactatagaaaacaaaaacaaaaatcagttaaaaagcaatcaaaatttttcctgaagtataaaaaatattctacgttcacttctatattctaatttttcctgaagaatcaaaatagaaagaagatccttttcagattattttggcatcatatacacactagatggacatttttgcgttggcaccagctgccaggtgattttcaggtggctcgacacccacacaagacggcgctgtcacagagggagcagtggcatcaaatgtgttttgcaataattaaatcttccgcattattttctttaatcatttctttttaaaatggctgcatgagccatcattcaaatccttgaatcataccactataaatacgtgtattaccctatgatcttcaccacacaacattacttgttcaccaccttgctctccttgcaacttccacccctaccacctaccttgattctcttgagactttttttccaatggcgtcaaagtttatctttaccactgtggttttacttatgcttttgtgcttgcttctgatgagggagccttctggtttgtcaatgttctttttttcttgttattaccatagttatttgagtgacaaatattggaatataagattgtgtattgttttattcatatttttgttgctagagtatgtgttatagcattcttataatttttgttcactggttgcaggttgcggttctgcgtatgaatgctttggtgctaatgcagctgatctaagggacattccaaacaggaaggtctgactctctctctctctctatatatatatatatatatatatatgtgtgtgtgtgtatgtgtggggtttaaacttcaaaggggttaatttctctctctttttttcacgtgatttttgtatgatcgtaacgtgagaaagatcttttttggtacatagtttctggggtaaatttctataactttatcttgtggtgtatatatgcaggtgctgtctgttttgaaggataagaaaactagtgctctgaaggctagtctgcaaggatcatcaagcaacaagtatggtgaaaagccactgaattgggagttaaggaaggttccttctggtccagatccgctgcatcataatggtgtcaaccccaaaaagcctcaaaccccttaaactcaccgatggaaccttctttgtgctcttggcctagtattagttatcagtgtgaacatctaccagcttatggcataaatataaacatacactcatcttccttttcatctcttgttttacctattttcctctctcttttttcttcttagtatttccacccctttttcaggtgtatgtttatgggtgttgaagttaattagtgctttagtttttacttgtagtagaatagatggcatcatctagtttctgtgctaattttatgttaattaagcagtatttaatgcatgcagttttttaaggctggaatgaaatgtcgttatgcaaaggcaaatttaaattaagttaactaatttaaaaccagtgaaatatggaaaaggaaagaaaaggaagaagcaagtcttatttgacagattattttttttaagtaataatacttaaatattttattatttttctttatttttttattatatcgtaaattttattgtatttgtatatttttaatgttatatatcatgagtgatcatgtaacattctttttctatgtggtaaaagattatgtgcacagctcattcatggattggacgggaaaaacagtgacatgatgtgttctgctcctttcacccgaatactacaaaagtatgtatatgcagataactaacctagagcttctattcatatctgttatgttatctatgctattctgacgcgggtcagctagatatgacagcaatgtcactaaggtgacgcaagcgaatcatttccactttcaaaaagtatccaaatatccaacccaacataacaaattgaacaaaccaaataatgggagcaaaaccaaatctggtaaaatattctctgcccgtattaacaaaggtatatatacatacatatgtatatattcatgaaaatgaaagacaagtgaaaattataataatacacaataaacataatcttttaccacataaaaaaagaatgttacatgatcactcatgatatataacattaaaaatatacaaatacaataaaatttatgatcaataaaaaagtaaagaaaaataatatatatatatatatatatacaaattatattattcattcaatatatggataaatgaaaaaaatactattactcttactcatacaatatttgtttataagatcattttttttctatctccctttcataaagtcgaaaagagtcgctgttgtgcatatgatttgttaagatgatgatggctaaacctcaccaactcgtgcctttctacgctacacttctcgacgcctgttctttctcaatcta

SEQ ID NO: 298 - DNA, 4615 bp, Glycine max
  source 1..4615: mol_type = genomic DNA
atattattaatttggacaacattaattttacctagctaactagttaactatcttataaaggagtcactgatcactagagatggagctagtactgtttggattcaaagaaatgcatctaaagcgaacagagaatataatgatgaatgtgagacatacattaagaaaattcaaatccatatatgtctccagttcatgcacatccattgaaaaggactatgtatatgtaatctatgagatatagcaactttcaaagaataaaacaacaagtgggggtcgagtctatctcaacttagattgctaaaaaccctaatgatagatactgatagcaacccttccttgatgcaagtctaagtcccctgggtagaattttacacccagaaggaggcattgagctactgtggaccatacatgacctgttctcaaacatgccccccctctttaagcacaataaccacgcaaaatgtctacgtaccctactccttgtcttgctttctttctggtataaatgtcatctttcattcctagggcaaactttaatgctcaaagatttgtactgtacatttgatttccatcctttgttggtaaagattttcatttggaatattaattttttttttctcaatgcatttgactgatattatttgaatattttttgaccctttaatttgttgatagctctagctagggcaaaacaacaaaaaacaagaaaactagatgcagaagtatatcatataattatgcaagatcatatttattaataaaattatataataaccagtataatgctcatttttttctaccttcatcatataattcactttatcgcacatttctttttatctcttatttatatatttattaaattaatataatttctgtatatattaggaataattaatacaaaagcaacatgtttcagaatcacatatctttgcactttataattctgtctgtcatttcccaagtctcaaccaaaccagacgaagctagctagcaatttgcaaaaaaactgattaagttaagccccccacttccactaccacactcacgctctctttttaaagtcacgagacccactgtcccattgttcattcaatttttggtgtggggggagataagagagagagagagagagtggcagaggaaccgatagggaactttcaaagctctttatcttctaccatcactcaactagcctctatattgcagtctcaaactgaaagtctcacaaattttgtagaaaactgtagttttatccccacccccctcccccatctgaaagaaagagtatttgcctcgcatcatttttcttttctttctctctttctgtctctctctctgtcggtaccatgtaggtcttcccccactactacaccttcacacccttcttctcatcctcctctttctccttctctaactctaagcccttttaactttctctctatctttttctctctcttatgactttgtcgttcctttacaggagaccagaacgaaacccattagatcttaacaatttgcccgatgagtactctagggatggcaaacaagtcctcgaagaccatacctcttcacccggtaaacttcatgatcatatctatctatctatctatatatatatatagaagcacgctagaatatcaaaggaatactttttttctttatatattccgaattctatttcacaaacacacaccatgggaagcctttcacttttcacaggaaacaaagttgaacactgccgtggtttgttacttacctctgtggtatattccttgaccatgaaacagtgttcaccacacttctttttttattcttttggttttgtccttgtatacgtttccttctctcctttttctttttttcctcttcttctcttaaaagataaaagaaaaggaaaaaaaagaagaagcataaaagtagttaggtgatagaacttaaaataaagaaaagtaattgttggggcgagcgattagttaattaattaaaatgaattgaattgatttgagggatttgggtaatcgagaatgaggcgtgaaagggaaagaaggtggtgtcatggaagttgctgtaattggatggttatggttgcaggttgcaggaaaaagaaaagcggcgggaaggatggaaaagacgagtgtgggaaggtctacgagtgtagattttgttccctcaagttctgcaagtctcaggctcttgggggacacatgaaccgccaccgccaaggctagtatataccacctattatatcttttcgtttttcttcctctttactctcacaagaaccaaatcttcactgcccgttaatgatttggccatgaagggttgtcatttcaatcaaaaaaagttgagttagctgaaattcgatccagagggtcccttcagctgtttttctttttttctttttttaattctttctttctttttgctttgcttttattattttgttttgagcagagagggaaacggagacgctgaaccaggctcgtcaactggtatttcgtagcgatcatatcattgctccacaaggtgcccctcacttagggtatgcacccattacttccatgcagctattctcttccaatttgttgttgttgttccaccctaatattacactatcattcccagttctttcttaaatacttgtttttctctaggttctttagcatttgttaacgttgttttttcaagttaacgcataatattagggtgcgcagcatgacactgtttgatacaattgactgtgataatattcagatgctgccagccaataggaacggggggttatcacccatcaggagacccaacagtgcctctaagattcccgagatacttctcaggttcatcctcaactcacatgccaccaccgccgccgccgccgccgccaccgcaacaatcacacctatacgcatcaccttcgaggccagtgtcatttgggtcatcacacttcccccaccagcatgctgtgaacgattactatgtgggccacgtgatgagtggtgggagccacggacactatgttggaggagagagcacgagtagttacacgtacattggtgccccggtggggcaagctggtggattcgctggtggtggtaaggaggggtcagcagtgcaggaggaagggttgagttggggaaggagctattcaggaggagcacagcatcgtttggatcctccctcagcgatcaatcggtttcatgatggtttctaatgagatgagatgagatgagagattcttttgtttgagtgtttttggtttgcgttttgtgttatgttattttatgtggtatcatcataaagacacgcaatccagagagagagacataacaagctgacacatggggtcatggagaggagggtatagctaaggctaggatgaagagagagagtgtgcgtgagaggtggtttttggtttatctacagtaaccaggaacagcttttgagctcatggacacgctcagctactttggcttggagttatgggtgggatttcttctcaacatcgccttttgtattggtagctacctatcttggacaaccagttagatatgaactgaaactttccaaactccttttgctttgcatgccaaattacaaccattttccttctaatttgcttctttcaacatactactattactattttatttatatatatctatttatgtgtgcatgtctgtttttgtgtttaatttaccatttcaaattccctaaagccccccgtcactctcgatcgctctcactctttctatccaaaccaaaattgggatctactaatttcttgaaatgttttatggtctcagtgtcacactatgctagcacaattagggtaatgacgcagagaagttttggagtcctcttacgaaaaaactatctagctgaattaatgctccctgaataggatattcaaacaatcaaacctgcaaaatatctaatttcttcttaaagaaaagctttatcctccctcactagctatttccacgatattgtaaataattttagaatacagagattatttattgcagcagacagtgaatgcagctatatttaatttgtttggagcataccaaacaaaactactatctaaggaataaaaacactcttgctgtcagctccgagagcttctaccaaatgcagcagctaagagaaatatatacacagccttaagtagctcatgatcgttcttgaaacagtaaaacacgtgtaaataatgtaaccacattattattagcatgatattttctcttgttttcaatacttgttggaaatgaatatgtttttctttgtatataggttgtacgtactccctttacgcacagtaattgaggatataattataagaaaaattatcctcttaaaaattattttaaaagaaaaagtgtttttctggcttcttgtcctatatatatatatattagttcgtgctatatattttagttcgttttttcactcaaggagaattaaatattccttcactcaacaaaggataatatgttaaaccgtttataagtgaagtttatttttttctaggcatggtgaaaatggtttgtatgaaaaggaagggtgatggttagtgacttatatatggcagtgttgatagtgtttatggtac

SEQ ID NO: 299 - DNA, 2913 bp, Glycine max
  source 1..2913: mol_type = genomic DNA
tgtcgcggcctatattcaaaataatataattattgaataaatcaacaattttatctctaactagttgttacaaaattaaattatttaagtaattttttaagtattgatgaatatttattattttaattggtttatgtattttaacaaagttcatgagcaggcttagtttgaagagttttttaatatttgaaagattgttttacatgatttttaatattaagactatttgagtagttttattttacttttttttgacgaagtttcttttcattttacttaaaacactagttgaaagagaaagaaatactttaaatataaaattgatgatttattctaatggcttattttaaagatgaagttgatctcatgacgcttataactgggtagcaaacctgtgcagtattaggagtgctctcctattactttttaattcagcaatattattatttagtaaaagaagataaattaatctcaaacataaaagatacagttttttttcttccggaaaagggataatgaatgagtctcattctattatattaaagattaattttatttgtaaagtgaacccataaataattctctacatataaacataacaatttcttacaccatttcaaacataaagagatatacagttaaaaaagcaatcaaaattttctacgttcacttcaaaattctaattttttcctgaatcaaaatacaaagaagattctcttttcagattattttggcatcatcatatatacataagatggacatttgcgttggcaccagctgccaggtgattttcaggtggctcgacaaccacacaagacggcgctgtcacagagggagcagtggcatcaaatgtgttttgcaataataaaaatcttccgaatttttttctttaatcatttcatttaaaaatggctgcatgagccatcattcaaatccttgaatcaccccactataaatacgtgcataaccccatactcttcttcacaacacagcacttgttcaccacctggctatccttgcaacttccacccctacctagtttgattctctaagacctttttccaatggcatcaaagtttatctttaccacggtggttttagttatgcttttgtgcttgcttcttatgagggacccttctggtttgtcaatgttcttttttcttgctattaattaccatagtgatttgagtgacaaatattggaataagagtgtgttatagcattcttataattgttgttcacttgcaggttgtggttctgcatatgaatgctttggtgctaatgcagctggtcttacggacattccaaacaggaaggtctgtcactctatatatatgtgattcaaacttcaaaggggttttctcttttttattttctcatcacgtgatttttgtatgatcataacgtgagaaagatctttctttggtgcatagtttctggggtacatttctataactttatcttctggtgtatgcaggtgctgcctgttttgaaggataagaaaactagtgctctgaaggctagtctgcgaggatcatcaagcaacaagtatggtgaaaagccactgaattgggagttaaggaaggttccttcaggtccagatccgctgcatcataacggtgtgaaccccaaaaatcctcaaaccccttaagctcacctatggaacctgctttttgctcttggcctagtgttagttatcagtgtgtgaacatctacaagcttttggcataagtttattgaaaaatataaacatgcactcatcttccttctcatctcttgttttacctattttcctcttcttctttttctttgtatttccacccctttttcaggtgtatgtttattatgagtgttgaacttaattagtgctttagtcatgaattgtagtagaatagatgtcatcatctagttaattcctgtactcattttatgttaattaagcagtatttaacgcatgcacttttttaaggctggaatcaatgtcgttatgcaaatgcaaatttaaatttaagttaactaaaaccagtgaaatatggtaaaggagagaaaaggaagaagcaagtgctatttgacaattgtgatggcattttttatgtgctaaaatattatccgcacagctcattcattgattggacaggaaacaacagtgacatgatctgttctgctcctttcacccgaatactacaaaaatatgcatctgcagatatccttctctgcaataactaacctagagcttctattcatatacttatatctgttatctatgcccctgctgacgcgggccagccagatatgacagcaatgtcacgaaggtgacgctagcgaatcattttcactttcaaaaaagtacccaaatatccaacgcaatataacaaattgaacaaacccaatgatgggagcaaaaagtaccccgaaacccgtaaccaaatctggtaaaatattctctgcccatattaataaaaaatactattactcatacaatatttgtttacaggatcatttttttttatatctctctttcataaagtcgaaaagagtcactgttgtgcatatgatgatggctaagcctcacaaactcgtgcctttctacgctacacttctcgacgcttgttcttcctcgaagcacttgaaaaatctaaaacgaatccacgcgctaaccattaccttaggcatttcacgcaatgacttcattcgaagcaagcttgtgtcttcctacgcttgctgtgcccaattgcacgaagccaatatcctcttttctttcaccattcgccaacccactttcctctttaactctctcatcagagcttattcctctctcaacttgttctcccaatccctctgcatctttcgccaaatgttgcttgctcggaaaccctttgatcgtcacaccttacccgtggtgctcaaatcttg

SEQ ID NO: 300 - DNA, 7322 bp, Glycine max
  source 1..7322: mol_type = genomic DNA
cttgagcatcaagcactaaaataattaaacttctccattaccaaaaaaaaaagataggtgattcagtaacatgtagtactagtactactgattttttttttcttttgattttaatgaatggttcgtatcgagcatcgagaaatccatttattaggtgtgtaatgtaatagtagtatttccttgattttcagtaataagatggattcttacatttatatctgtttgacagaaaatgttgtcaatgcatttcttgggcacaaagttttttgaaacatgaattaattttttcaaaatatttatgacatcaaattgaccctaaaataagtgataaagctttaacgtggaatgacattaatttttccatgataaataaaacacttaaaacattttaatattaatattataatcagttacaactatgttcaattaatgcaataacttttaaataaatattaaaatattttttttctgttctccaataaagagatcttgttgcacggaaaaagtcacattcttatttagtaaaaaattataattattgtttgaaaaatatcattttcactgcagaaaatttgatccagctctacagatcatacttttattgtacaataatacaataaaaatattcatctgcaggaaatatcattttcattgtacaataatataaagataaatatataccagaaaagaaaaagaaactgatgtggcacaatgtattcactgaaagaatgcatattgtatttcacctttcaagcagcactaagaatatacttcttttattatacttgtgcatttactcaaccaccctcggtggagtaagaaagaagatagataaaagttttttttgacatttggtgaatctcttaattaaaaaaataaaataatccatttcctttatttaatttcttttttcccatctgtgaaattccaattctgcttcgcgctcctgtctataaattgacttagccaccacctcagtttccattcattcacttcttctctttataccccccctctcttttttgcgttcattctgttttcgtaagtactgttgtttttctcttctatttctttttttgtttgtgttgtttttttttcttccttatcgttgttctgcctctcctctgtttcggtgctctgttcaccacttccacgtgagaatgatcttccttctttgcatgttcattctctcgtgaccactggatcagactccatgttctgatccagggtctctctctaacgcctgtactttcatccatgaccaccttaaaaacaacatgggggtggtgctgttacactaactctgtttctggggtgctgtctttgttcaattttactcagaaaatatcttttcttggattctattcggtgtgtgggaacatgatcctgtcggtcggttgtttttaggttaatccttaactggttacaaggatctaacgcttgaatgcatgtcctgagttaaagaaacaaaagaagaacacacctagtacagcctggcctcgaaccaagaacttctttgttggtttctcattattactaaaataaaataaagtatacgttttcttttttctttgggatgaacggttcagacttatgagaagtttaagctaatcctgtagtggagtgttcaatttattttaaactttaaagcaatagctcaagcactaaacttctttttcaagttcaaccactttggtagcttgctaattgctgctattgttctaattaattaatgtaattattgtttaaaaaagaaaagttggtgacactggaataaaaaagtgtactatctggcaattattcttctgcagcaatgtttgaggttgaaatcttagtagaacaaagtagaagatctggtatttatattttttgtagacagatggtgggggtgggtggtaggccttgaaatccaatatagttttgtagaataattttattattttttttttttgctcacttgtttgtggtattgattttgtgatgactcaagattaatgatttaccttcatttttttcatggtgacatattatgtatattcttgatctgtttcttacacttctttttcgttgttgtagctgttgaagtctttccctagccaatggccaccgatcgtttgacccgggttcacagtctccgtgagaggcttgatgaaaccctcactgccaacaggaatgaaattttggcccttctgtcaaggtaactcatcattcttgtttttggtttagaagatttttttaaaagtcaaagtgttttctctctttaatggtagtgaagttctactaactatgtttagacagtgagtttgtttaaggaaactcaatttgtgtttgtgtgtgttctgtctttaaaggtggtgaaagttctactatgtatgtgttgtggaagcagtagtgtaacactaagaatgttatgaaattttgataggatcgaagccaagggcaagggcatcctgcaacaccaccaggtcattgctgagtttgaggaaatccctgaggagaacagacagaagctcactgatggtgcctttggagaagtcttgagatctacacaggtaactaacatttgagctttaaaaataggagaggttttagctatgatccttggtgttttttttgttttgttgattttcttatttctatgttgtaggaagccatagttttgccaccatgggttgctctggctgttcgtccaagacctggtgtgtgggagtacctgagagtgaatgtgcacgctcttgttgttgaggagttgcaacctgctgagtacctgcacttcaaggaagaacttgttgacggaaggtgaagaaaaaaaggctttgaatttgtgttaaagcggtgtacttgttttgttatgttacttgcacaaattataaacatttctctcactttcattgcagttctaatggcaactttgtgcttgagttggactttgaaccattcaatgcagccttcccccgcccaactcttaacaagtcaattggaaatggtgtgcaattcctcaaccgtcacctttctgccaaactcttccacgacaaggagagcttgcacccacttttggagttcctcaggcttcacagcgtcaagggaaaggtaggtgtctatttctactctttaaactagagtaaagcaaggtagtgaggagtttatgcatgtgtaagacacattcttcagtagttcaatggcttgaatatctacatccatgtttggaccatgtctagtaaccagatctagagtacaaatctaatgtgtgtagcatatagtatctctagcatgttgaacttaaggcatgaagttagttttaataggttaattttgttgtgtattttactgatgaagatttttattttttggaatatgcagactttgatgttgaatgacagaattcaaaacccagatgcactccaacatgttctgaggaaagctgaggagtatctgggcacagtgcctcctgaaactccctactcagaatttgagcacaagttccaggagattggtttggagagagggtggggtgacaacgcggagcgtgtccttgagtcaattcaacttctcttggatcttcttgaggcccctgacccgtgcacccttgagactttccttggaagaatccctatggtgttcaatgttgttattctttctccccatggttactttgcccaagataatgtcttgggataccctgacactggtggccaggttgtttacatcttggatcaagttcgtgctttggagaatgagatgctccatcgcattaagcaacaaggattggacattgttcctcgtattctcattgtatgtcctagtacatagttgtgaagtgtttcagcaagctaaattaagcttacttgtgtatagtgtgtgtaatgtggatatgttattctaattggtgcttgtgaatgttgttaaaatgcagatcacccgtcttctccccgatgcagtaggaactacttgtggccaacgtcttgagaaggtgttcggaactgagcactcccacattcttcgagttccctttagaactgagaagggaattgttcgcaagtggatctcaagattcgaagtctggccctacttggaaacttacactgaggtaaatttttgaccccatcataatattgacaccgtttaagaatttttgatgtgttttaacttatccaatccaaattgtgtcttgttaacaggatgttgcccacgagcttgccaaagagttgcaaggcaagccagatctgattgttggaaactacagtgatggaaacattgtcgcttctttgttggcacataaattaggtgtcactcaggttggtctacataacatgtctagttaaagttgttaggaccttatactttggaattcaggggcctaagttttttctctttgtcaactgtagtgtaccattgctcacgcacttgagaagaccaaataccccgaatccgacatttactggaaaaaattggaagagagataccacttctcttgccaattcacagctgatctatttgccatgaaccacacagatttcattatcaccagtaccttccaggagattgctggaaggtgagctaacccttttacatttttgttcttttgcctattttttcatttattttattgattagcttactaaaattcttgtatcattgttcaaatacttttacagcaaggacactgttggacagtacgaatctcacacagccttcacccttcctggactctaccgcgttgtgcatggtattgatgtctttgatccaaaattcaacattgtctcccctggagctgatcaaaccatttacttcccccacactgaaaccagccgtaggttgacatccttccaccctgaaatcgaagaactcctttacagctcagtggagaatgaagaacacatgttagtttctcctctcatttccttgatgttatctaatcatagtatcatgaatggtcacaatttcatcaaaatgtttgatattgtgagaaattgcagacagacacagctgggttagaccacaaagaaccgtttttttttttttttaaaaaaagaagaaaaccttggatatcatcatgcatagaagaacatttgtctaatgcaaattcatgtatgacagatgtgtgctgaaggaccgcagcaagccaattatcttcaccatggcaaggttggatcgagtgaagaacatcacaggacttgtggagtggtacggtaagaacgcgaagctgagggagctggtgaaccttgtggttgttgctggagacaggaggaaggagtcaaaggacttggaagaaaaggccgagatgaagaagatgtacggcctgatcgagacctacaagttgaacggccaattcagatggatttcatcgcagatgaaccgtgtgaggaatggagagctctaccgcgtgatctgcgacaccaggggtgctttcgtgcagcctgctgtatacgaggcttttggtttgacagtggttgaggccatgacttgcggcttgccaacattcgccacatgcaatggtggtcctgctgagatcattgtgcacggcaagtctggcttccacattgacccttaccatggtgaccgtgctgctgatctccttgttgacttctttgagaagtgcaagcttgacccaactcactgggacaagatctcaaaggctggtctccagcgtattgaagagaagtaagcatattaattctgaatcaatgtgtttctgttctgtctgttgtggtaattaatcattttctttcttcttccacaggtacacatggcaaatttactctcagaggcttctcactctcaccggtgtctatggcttctggaagcatgtgtctaaccttgaccgccgtgagagccgccgctatctcgagatgttctatgctctcaagtaccgcaaattggtatgtatagtatagtactccctctgctcatttttattcagtgaattttacactataatttttttcttattaaaagggctattttctcttcatatttttaccttgaaatatgttgtcattgaacttgctaatgtatcttgttattgtttttacctttaggctgagtctgtgccccttgctgctgagtaaactgaggataaagagttggataaagaaatggaggaaccggctttttctttctcatttggagtttgtcgcacttgagttttataaataatgtccgtgattttagttttgtgattaagctttcgataagaggagagaaagagaaggaaaaaaaaagttgcttttttttttgttgttgcatgatttggatcttgattggaaaagcttcgaattggggtagttttacccatcaattcaattttaagccgtgccttcttcactttgccgtgtctaatagtatcccttcccaacttaaacttttatatactgtagttctttttatctttaaacttaaaacaaagccatgaaaaagcatcatcatcatcataataactagagactagagtattgtaggacaaaggggcccccgcaatttcatccgttattgtctatatcaatatggtggaagaaagtgaaaattgacgttggaatttaaagatttaattgtcgttgtcaaatctcattgttccattcccgagtagcaattggcaaagcaactcctcttcaacagaatatttcgcgtctggtatggtatctagcaatttcaatgaataaaatcctacgagagttaaagtgagttgttgggaatggacttgtacgttaaattttgtatcctctcccatttttggccaccctcatccaacggctcttggttgatcccactttcactttagtcaaataacgctgccatgaaattactaacctttttgtttgcttccttctaatcagacacatacagtgggagaagcattttcttgtgaactgtttatgatatcgaaaatgacacatcaatatctttttttttttttattaacaaaagaacgttactaattaactaagagtacaagtagtatcaattccaaaataaaagagtccaagtagtactcaaagataccacgttcagttacaatatatgagaacaaatatgtagaagaattcttgttctaaatataaatttatcaacccttgcccttacccataacataaacactttattatgttagcatcagttcacctggctagacccgaaaatagtaaaaaaaaaatgaaaatggtatatcaataaattgcgattttgtataaatcttaattttttaaaaaagtaaaaaacatagtaacaatataacatttcaaggtatgaaatatctatataggatctgatatgcttccgaatcttggcttgtttgaatcccttggctagcagcacacttacccgta

SEQ ID NO: 301 - DNA, 2896 bp, Glycine max; identical to SEQ ID NO: 236
  source 1..2896: mol_type = genomic DNA

SEQ ID NO: 302 - DNA, 6532 bp, Glycine max
  source 1..6532: mol_type = genomic DNA
gtgttaatttcttttggtttctctttccttccctcttcattttcgtttcctccttactcaaagccattaggagaggagagagagaggaagagtaaaaaaacaatttgttttagaacggtgtaaatctttaggattcttgtggaagaattcatctttcacgccaaagatcttgaatctatctttagtggttgatctagctaagacgatcttgagtttaagaacctagctcaagacccatcaaagcatctttattggtatatctcattttgagatcttgagcaacttttttgtagtcccatagttccacataagatccatgaattctcccatttttttagagttagatttcattttgagatcttaaaccatttattgtaggtctcacaatagattccacctcttaaaattttctcccatgaacccaataccccctccatttttccttcttttctcttccctctccccatccaggaacctaatcctcacaagttcctttgtttttgccaccctcctttgccctcacctcctccattgctacctcctttatctctagtagtagatcttgcaaagactaaattttgagctcaagaatccacttcaatatccaataagaaatatgctcttttttttttgtggatcttgttagaacattagttaagaaattaaaagtaaaaatatttattgtgcaaattataagagaacgcaaaagaagatcatagataatataattttttgttacccaataaaaatattttcacttaaaaaaaacttaaaaactatgctccaagtacatacatacgtaacacgtgtggacgtgtacatttggagtcgcttaagatttaagaaaagcaccgccgtaccttgacgcgtataaaaaatatcgagatgttgctacgacgtggcgtccaaactaaggcacacggataatgaaaataaatacagcgcgtgagcagaagttacttactcactttacactgcatcaaccaaacaaacaaataaagcaaaaggcctttttattccaaagcaaggaaggaagaaataaaccgaatgagagcattaacctcttcttcttccactttcattccaaagcgttattccttcttcttcttcctctccattctcttcgctcttcgatcctcgtccgggggctgctccgaataccaccaccaccacgcgccgatggccacgataggaggcttacgcgactcccaaggctctcagaacagcgtccaaaccgaggccctcgctcgattcgccgtcgatgaacacaacaagaagcaggttgctgctaaatcgccctttttaaaaatatttttttccacaaaataataatataaagaattgtttttatttttaatcttgttattcgttgtcacttgtttacgtgttttgaatgcacaagaccaggttgctattatgttagtgtttgattcgaattccagagtacaagacaagtttaacagaagaagttgatcattcgtgaactgtgatgttatggccatacagaaacagaaatatatattttaaaagcttaatacatcctggattatttgggaatttttaaagtaaactataaaaaattgtatcatttacagtttttgtaactgggtctttctggaatttgtaaaaccgccaaaattctaactccaggacccaattacaaaaattgtcgaagatcaaggaccgaattacaattttttagtctagtgaccttttatatatatatatatatatatatatatatagaatttggtgaattcttatgaattacaatttgagtgtaaaaaattgtaagtgtcattgaattatagattctcatgaatggtaagattattcacttttatgaaacaaattcgagtttaatgcaattttaccataaaagtaccttaagatagttgttatcaaagttagcaaactttatcatacccggttgtttggatgacaatataaaaaacttttacaatgtcactacatagtaagtatatatattatttcctcaagttattttaggtgtcatatctagaatgatttcgaattagttgagtaaaaatctttttcggttcactgatcaatagtacaacaactgcagtctgcaatagctttatcctattaggtgaggtcagttaaacgaaattctcaggaatatcattctcgatatgctaaattatatgaattcatctgtttatatatagtgagggttatatgctcccactaatgtactgacatgttatttggattgctgaactttcttgtgattgtgattgcagtagttcttttttctttatcctgtcttatgttctatatgatgaacaatgttttatgtgattgtgaacttaacgtgttgacttgtgttggatggtgttgaagaattcacttctggagttttctagggtggtgaggacacaggaacaggttgttgcgggaaccctgcatcaccttactctcgaagctattgaggcaggtgagaagaagctctatgaagccaaggtgtgggtgaaaccatggttgaatttcaaagaactccaagagttcaagcctgctggtgatgtaccatcatttacctctgctgatcttggtgtcaaaaagggtatggcattttctaaatcaatcatctgtggtctttatatgactaagaaacattctaattggggtatttatttatttttatatcctccaatgtactaacagagcaactgtcattctctggtttctgttttatttttaattgggacatatgaagtgtatgttttcttattacaacactcacaagttgcatacaacaagcaagatccatcaatatcataattatattggtaatttgtgacgaggaataaattttcagtgcatgttagtgatcagaaggctctcaaaaggccaaatgttgttcatcattatagatgctgcttttgagtgaacacagttagtgctcttgggtttggttatgtagagcgagttgaggaccaatcaatggaagttggatgttatcattgaatcattgaattgaatctaaatgtgttgaagaagtcagagttgagaaagatgtaaaattaaatggtctaatgccttgtgggaatatatattttcatatttagtgcaacatcaggatgtgaatatgttgagttttctttacattggaattttcatgggctgctatttgttacaccagcaatttccattaacaatagtcgtaaactcataattgatgtataaagttctgtaccatttgcctttgcatatttttcttgtgtatctattatagaacatttgaccccaaagtgcttattaacacatgatctactgttctgtttttgttatcagatggtcaccaacctggatggcaatctgtgccaacacatgaccctcaagttcaggatgcagcaaatcatgcgatcaagactatccagcaaaggtctaattcactagtaccctatgagcttcatgaggttgctgatgcaaaggctgaggtcagtgccttattctatattctttgaaatttttttgattgagtttgtttgctcaactagatgtcacatggttgaattgttggctgtaatttgatgtttaaatttgtagagctaggaaaattccatatgggagaatttgtgaattttctggtttgtctggtctgatttttggtgtattcatctggagcaggatcttagtgttcattttctttggcctggttatcttacctgcatgcttgtttagttgcttaccagaaaccttatgtaaaatatttattgtataatgtgtctagcgttatgctattagcttcctgtaatgtacattggaagttgcttttgtcttataaatttctgagacccgcagatcgttgatttgtagttagttagtcatgcgtgctttagtggtatttatgctaatattttgaaatgattattattgaatttatttaattgtttcaaatctaaaacaaccctggcattcccactaggtgggattggataaatgcaagatagatcatttacctcttaatccctcttagtggtttaaccttataattttctttgctctccctttacctttaactattgtacttttttccatctagtcgactcccttactggtgcttctatgagttttctctgcgcatgcccaaacaatctaagacaagactacctaccattctttcatattgttcattttttacacaacaatagctagctacatgcctacatcccactaggatgctgctcatttgttacacagacaaatttaagagtaatttatgcattcttttattgaatagaggagaactgtacaagtgtctacaaacatttgcatatataataaacacttctaatcagtaaaacttatgtatttagtgttgtatctactgctcgttgaatgaaattattgacaggataggtcaaacaaaatggcagattagagttttatattgtttcatctattgcggattgaatgaaaccatagatagaaaaggtaaaattaaatgacagtttagcacaaaagttgtctaaaataaaattaaggattaaagtttaaggttaaagacaagttgtgctcaagatatgcttcttggtcctttatcaaatcccttacattattttatatgcgaatttcacttctgtgaaatctgcttctggctacactaaataacctaactctatattagtcgagttaaacatgagattttgcctaataatattgtattgaaaagagtgagttgttagcatttctttattctaatattcatcaggtctcttcccttctcaagtcctcattaatatggtatggaagaactgttactatacatgtgtttgctgcttgcaacataaacatgtattcgccgttatcttattgctcccaaagatatgtaaattaatttagtaattaaaacatttgataagaaaagctgcatttggggatagcttacaggcttcttttgtgactgttggagagcatcccgggggtagagttactggtggtgtatcatggctgatggatgtgtaaatttctatgcaggtcattgatgactttgccaagtttaatctgcttctcaaagtcaagaggggacagaaggaagagaagttcaaggtagaggtacataagaataaccaaggtgggttccatctaaatcagatggaacaagatcattcctaattctgatcggaagtttggccacgctagcagtataggcctgggtggcacctaaaatatacctttttttttcagtggggtgtatgaatcttattatctatgctatacataattatatactaatcgggtattgttcttatctctgtctcagcaagtatgttagtgcttacccctttctctaagccttggcagataagttttcctatgtgtattggctttattaactgggaagctaccaagttacattagtacctttgtaacgtaaatatttacttaacataaaaatgtggatgttgaccatttgcatttaacgtatgcctaaagaatgtgaattattttttacctttaaaattaaattttaacatttaatgtgaataattctttttggctgagtttcgaacccaaaagacctatgtatgtaacattgttaactacagttaacgttttttttttacttaaaaaattagcaagtaaatgaagtgagatggaaactaacgctaaaagaatattggccctaatgctttacaaatagccgcaggcattaaaataacgaaagatattatcaaagacatgaacttggtttatatctccatgtgaacagttttgggagatggagatggtagatgagagtctgttgcaacaagactctcttttggcaaaatgcatgatagattgagataagtatggtatatatttttttattggtttacatggagtatgatgatacaagagctgtattgcatttgacgctatcataattcctgtatttgttatgcctgtatcatatagaggagtattttccacagtattgaggtaaatttagctagttcggaccctcgcaagtataaatgttttgctcatccttctcttatttggttgcaaagaaaacgaagtaaattgccaagcataattgcataacgaggggttcacaagttctttgcaacaaaagtgccgtttaaacagggctaatgttgatccatatgctttaatcacgaaactgaaatgacaaacaatgtttcaaaacttcccttaaaattagcatactatcacagaaagatcgagctatagttgacaaaactgataacacgctcctaaagtgaactcaatctaactaaacaattgcctgggacttgttaaggatcactccctcatatttcacctggaaccacttcatagcatcctcctttgtgacacggtgctgaattccaacacgggacttgcacctacggcggcgtccgacacgatagccaggacgctccagtacaacaaagaaatccattccataaataccagttgaaggatcatacctgaagcagaatcaataatcatggaccaatgtgtaaattgaaatcttcatactcaaagaaattgaaatcataatcaaacaaatatg

SEQ ID NO: 303 - DNA, 4588 bp, Glycine max
  source 1..4588: mol_type = genomic DNA
tgatactatttcaataattgattataatcaaaattaatttttgtttaaataaatttattgaaaagtaattttaagataattaattttgtgtagatacaatatagtaatcagcttttacacgctaaattataaaaaaaggaaatgcaagaagttgaaagagaacaaaattgttgggaaatttaagagtgattcagggataacgtattaacatgcatgagaagaagaaaaaagttgttaaaaaataatcataagaaacaaatatctaagtgcataaaatttacttgagataattgcaaaaataaattatttcaataatccattatataaaaataatttatgtctgaataaattttgtgaaaaattgttttaagattacaaatttccgcggataatttttttttttacaaatttccgctgctgattacgtgcatcgtaaagaaaggaaagcgttgataagcaacaaagtagaaagtgattctagaataccattcttgagagtcacaggcaaaaccgtggggcgcacaccgaagtagacctgcagagtccaaaccggtgggcccgaacccaaggtgttgggctgcggattcgaaagcgaaaggacgctctaatactatttcttactattacatatattatttacggtaaataaataccaatcttaggtattggcaatagaaagaaagaaaaaatattactaaaatgtagtagttttttaataataagaaaaattaataatttttttattagtatcctttaggtatttttactgtaaataggaagaatggttatttatatttaaaaaaggaatatcccactggaaatgtaatattcgcttctggaaggtaagtctgggaatgaatgaccggtgtgggactcgtggcgacttttagattcaaacaaaaataaaaatcgcacgcatactacagtaataggaaaggaaagaggaaggttgtggtaaataaataacctaacctaacccttgcgacttgcgacttgcgagtgagactgaggttgggtttggaaggcaagggcttgtgttgtcacaatccaaggtttgtttgtgtttgtgccactgtcctgtctttgtttatatatcttagtttcgtcggtgtttacttagatgtatgtgttgttgtagagagaagtaatggcgaacatagacatcgaagggatcttgaagcagcagcagccttatgatgggcgcgttccgaagacgaagatagtgtgtactttgggccctgcttctcgatccgtagaaatgaccgagaagcttctgagggcagggatgaacgttgctcgtttcaatttctctcatggcacccacgactatcaccaggaaaccctcaacaatctcaagactgccatgcacaacactggcatactctgtgccgtcatgcttgacactaaggtaggttcttctattcatgtagccaatgattttgatgataataagcatggtattggtctacatttcttgtctttttctgatctgttgtttccatataactattagcttcaaagtgaatgttgtatctcgttggtgttaatctctcttgaccttttagttttacatttaatcctactggattgtgcagtagttggacagcttgctgcttttcttttttcttcgtaaatatcttgttgaggaggatggctcgtcctgtttctcttgtatggttgtcaatttcttattccattaacgtttctgtctacatctgctttgtgcagggacctgagattcggactggttttctgaaagatggaaaacctattcaacttaaagaagggcaagaagtcaccataactactgattatgacattaagggggatccggagatgatatccatgagttacaagaagctgcctgtccacttgaagcctggaaataccatactgtgctctgacgggacgattactctcactgtcttgtcttgtgaccctgatgctggtactgttagatgtcgttgtgaaaacactgcaacgttgggtgagagaaaaaatgttaaccttcctggtgttgtggtggatctacccacacttactgagaaggataaggaagacattcttggatggggtgtacccaacaagattgacatgattgctctttcatttgttcgtaaaggctcggatcttgttaatgtccgcaaggttctggggccacatgcaaagaatattcagttgatgtcaaaggtattttttgttgaacattcttattcaacttccataataactacaggttttttctattacttgtgatctatttttcatctgtggtttctcagttgctttggcaatggctgtttttttttcatcatacatgagttgcacattgataatggaatttatattggttaagtgctccataactcaagactaataagtggaaaacccatgcttttaacctccacagtatccatcacacagggataaaggaagagaatttatgtccttgtgtagcagactagcttgatatcttttatattctttataacacaagttgcatgctagtttgtttggtttttttccatatgctgaagataccagttcttctctgattttatgctatgctatttaaaggttgagaatcaggagggagtcctgaattttgacgaaatcctgcgggagactgatgcattcatggtggcacgtggtgatcttggaatggagatcccagtagaaaagattttcctggcacagaagatgatgatatacaagtgtaatcttgttgggaagccagtggtgactgctacccaaatgcttgaatcaatgataaagtctcccaggccaacccgagctgaagcaactgatgtagctaatgcagttcttgatggaacagattgtgtgatgcttagtggtgaaagtgctgctggggcatacccagaacttgctgtgaaaatcatggctcgcatttgcattgaagcagaatcatcccttgactatggtgccatcttcaaagagatgataaggtctaccccattgcctatgagtccattggagagccttgcatcatctgctgtccgcacagcaaacaaggccaaagcaaaactcattgttgtgctgacacgtggcgggtctacagccaagttagttgccaagtataggccagcggttccaatattgtcggtggtggttccagtgttgagcacggactcatttgattggacctgcagtgatgagacgccagcaaggcacagcctgatatacaggggcttgattcctatactgggcgagggatctgcaaaggctaccgatgcagaatccacagaggtcattctcgaagctgctcttaagtccgcaacagaaagggccctttgtaagcctggtgatgcagttgttgccctgcatcgtattggagctgcctctgtcataaagatctgcatagtcaaataatgcatgctcaactcaacgtgccgccaactaatgcagggttatgttttgccttttatttctttctttctgctgtttatccgtatcataaaatggaggatttagttactagctgtagatcgagtgttttttggtatactctgtttatattgcggagtacttctaaatcagattatcatggaaataatactcttaccttttaaaatgtgattggttttgcggataaccctgtttcacgcctgctgccaccagtttcctacttcttccttgtatttgatgatacattaacaagctgtaaaatataaatgctcattatccattagggttcataaggtatttttcaagtttaaattctttggagttgttagaaataaaaaaatatattgttctatgacacactgccataataccattagaacttactggaataattgataattgtggaaccagtttttatataaaaattaagtttttaagattaaaaaattattttgttttgagaataaaaaaaagatgagactcattgtaaagtttttagaagttgaattattagagtaatagatcggcgtaaatccacccaccgttggttctatagtatttgcgaatgtgcaatttttcttattcctatacaaatttacttgcatatttggtcttagcgtttttaaaattgagtatttttttttacaacaaagtcaaataatttcaatcataatcaactgagcaatacattgggaaactttataaaaaaaaacttggcgactagtaaaatgtgggttgcctttgccaaaacatgagcaattccattgccttgcctcctcacaaaactaacaaaaacaataaagatcggcttaaatccaccgttggttctatagtattgcgaatgtgcaattttatggttcctatacaaatttaattgcacatctgctcttcaaaatttttaaaactgagcaatctttttttactataacaaagtcgaggaatttcaatcataatcaactgagcaaatacattgtgaaacttgctaaaaaaaaaaaaaaatacttggtgactagtaaaaaggtggggttgcctttgccaaagcatgagcgaccccattgccttgcctcctcacaaaactaacaataaagcttggatttaaacaaagtaacctcttacgctcagacactataactcccaatttagaataatctatacaacaatt

SEQ ID NO: 304 - DNA, 5744 bp, Glycine max
  source 1..5744: mol_type = genomic DNA
gagagacacctccacgaaggaggcatgactcctaaccccacaaggcgcaggacctggggacgtgagaccaccttaggatcacgacgatgacaacagtgacacaacgacgcaatgtggtctcgtcgaaattggtcaaaagaaagaaaaaaacatagccagaaggagaaagatgatgatgaaaacatttgaataaattaacaatgaaaagaaaaaaaaatgagtaaaaagagaacaataacaatccatatgcccttcgtcgacgctcaaggtggttctcgtcgatgtccaaggtatgacatttagagaggaaggtttagagaaggaggcgcataggcaaaaagaaaaaaagtgtaggataatgaaaaagtcaaaaaatatggatgatattgtatgtttacttttgttagacaccgaacaaaaaattatacgaaatttagtgaattacaagtttttggatatttgtccagtccatggtccattattttattttttaaatcaaacattagacaaatgtttgtatactatccaaccccttattttttaacaaataaaacacaccctaaaagagttttttaattaggaatgaaagaatatgttaaccaaatgagaaatataaaggtgtaattacacttttagaaactcatcgatattgtacaattttagtcctcatgtttcaactgcgacaattaattcccccaaatatcggaattgtgtaattttagtcccctaagtttcaactcatttgtgatacttataggacacaattaaaacataaatgactaaaatcatccaattaaaaacccaaaaattaaacaatgataaagagtgcaattaagctagtgaggggtaatagggtaaattaagagaaaagagaggagggtttttgctagggaaaagacagatgtatccccaaatcccgaattgatgcgcataaaccattcattaagtggttgtcccttcttcccctctctcacttgctcctcctcctccttcttcttctgccttacatcacatacttcactctcttgtttttccctttcctctcctcaaaatttcttctgattcatttaatctttactcatcaatggctctgagactgaaccctatccccacccaaaccttctccctcccccaaatggccagtctcagatctcccaggttccgcatggcctccaccctccgctccggttccaagttagtcccactctcagatccccccctaattaacactttttcttctttctttaaacaaaaatcacgcattcacaacttttcaattcgattctcaactccacttaccactttgatctacccttttgcgatattattattattattattatttctttttttctttttgtagcttttttctcataaaagtgtctttcatgtgtggttgagtgtctaatgcctgaaatgaaagctgggaacagtgcaaacgacgcgctagttctcgcgtgtattttgaaattgacgtttttcttcaagattcagtattttttgtctgttgagaaatgctaacctcggaagatatattcaattattgtttggattatttggtaatctgatggttggggtggttcgatttcactcaatacacacaacaccattggttttatcgctttttttttttttactttactttaccttttgggtttgcatgtatttttcttcgggttggtgagaattgaaaatggattgttatttggttgagacttgagaaatctgtttcatcgtgcttcaataccgacaactttttatttcacttgctctcagttttttgtctatgtttgtttgcaccgtgaaagaaacgtgtggttaattgaattgggtttcgtgatatcaattctgctgttaactgttgcagattttttgaattaaagaaataaatattgcatgtctgtgtcattcttatactgttcaatggttttgctatccatgttgaattcttgccattgttttaagggacttgttatttctggtttattgtttgatgttggtacatattcactaaattttggctttttttgttgttgttgggattcttctttcttcttcggtttcgaattgaatttatgtataatcaaccgtggagatttggaacttgttctgtatttattaccttgtgatttatttgatatggagtatggagtctcgtttcttagcctatgatttatgcatatattggtttgatgaatgttgccaactttatactaattgtgattctcttattggaggagaatataaaaagtattggtaactgctccaaaatgttacttgctgttgcatcaaaattgttttgctggttggttgagtttttggatgaagatttgagcaacctaggcatgatgtagacacgttctgtgaagctgtccatttatgactttggtgtttgtgttgatcaatgatgcatgtgcactccattttttgtgccatgcacatgctaggtacaggtacacattgtatatggctaggtacataataggtgtgtaccataatcttttatataaagatatgagtgatgtgatcatgtgactgggtatggcttgggtatcaactaattttatttaccaaaaatgttatcatttccccaattgaagatatggtccccaccctctcaattcatccttaccctatacctgatagttgtgagcagagtgtctccagtttaatgcatagacatgggttatgtatcttgctgcatcaaaactgatttactgtttgataggatgccgtgcaaactgcatgttctcatttttatgatttttgatatttttgtgttcatgtaatggtgtataactgttgtacatgtgggggctatatggttattgcttctaccaatgatgcctttcactctattgatcaaatttaccagcatatgatcatttaaaaacattttattatttctctaaaagtcgtttgaatttctttgtagagaggttgaaaatattaagaagccattcactcctcccagagaagtgcatgttcaagtaacccactctatgcctcctcagaagattgagattttcaaatctttggaggattgggctgagcagaacatcttgactcatcttaaacctgttgaaaaatgttggcaaccacaagattttttaccggatccttcctctgatggatttgaagagcaagtgaaggaactgagagagagggcaaaggagcttccagatgattactttgttgttctggtcggagacatgatcacagaggaagccctgcctacttaccaaacaatgttaaatactttggatggagttcgtgatgaaacaggtgccagccttacttcctgggcaatttggacaagggcatggactgctgaagaaaacagacacggtgatcttcttaacaaatatctttacttgagtggtcgagttgacatgaaacaaattgaaaagacaattcagtaccttattgggtctggaatggtaagatcctatacaactgtagtctattttggtcttccgcaatggtagttttattaatgaatcacacaatcatgcaatgtcaaagaaactcttgctacccatttatggatactttatttgtttgagagggtggggggataactgcctgaaatataaattttattgattaattcctctggatgcattaatgtgtcactgtcagcaactttcatattcacatgaatgtctttaaactattgaaggatcttcacagaatgaagggctagatttcaaagaatacgatgacactttcctgaaattcattattaaaatagattattatgttgctctgaagttattacactaattgattcttcatagctgctgcttttgtcactttttgagtattgacctttcttgactgattgaaattgatggataggatcctcgaaccgagaacagcccctaccttggtttcatttacacttcatttcaagagagggcaaccttcatatcccacggaaacacagccaggcttgctaaggagcacggcgatataaagttggcccagatctgcggcatgattgcctcagatgagaaacgccatgagactgcatacacgaagatagtggaaaagctatttgaggtcgatcctgacggtacagttatggcgtttgccgacatgatgaggaagaagattgccatgccagcacacctcatgtatgacggccgtgatgacaacctgtttgatagctactcttcggtcgcgcagcgcattggggtctacaccgccaaggactatgctgacatacttgagtttctggtggggaggtggaaggtggagcagctaactggactttcaggcgagggaagaaaggctcaagaatacatttgcgggctgccgccaagaatcagaaggttggaggagagagctcaagcaagagtcaaggagtcgtcaacacttaaattcagttggattcatgacagggaagtactactctaaatgcaccaagggaggagcatggtgaaatcttccggcaataccgttctgagaaatgttgaatagttgaaaattcagtttgtcatttttatcttttatttttcctccttttttggtctttgttatatgtcactgtaaggtgaagcagttgttcttgcatggttcgcaagttaagcagttaggggcagctgtagtattagaaatggtattttttttttttgtttcgcttttctctgtggtagtgatgtctgtcgaagtataagtaaacgtttttttttctctggcaattttgatgataaagaaaatttagttcttctgtggttggttcaattttgccatcgggtaactgaaatatatgctttactaggtaattttgttgtgtatcattctgaaatatatggtttgttactatgttcatatatttgtatacgctacgttaacatgtgagaagcccgcaaacaaaaagaacctgttgtatttcctgtttttaacctgttttacttcagtgctttaaattcagttgttatattttaatctaatttattaataggtttttaggttaattttttttaatgacttttttatgcttctaaaagtcctgaagttttcataaacgaatctgtttccgttacaagttcttaggactaaattatagaaatggccaaaatctaattcatacgataattaattattaggatgtgtttaagtattttaaaaatgaacctctttttaaagacatttttaaaagtgttttaatacaatgaatcatggatctatccaagaatagatttatggtgaatgaataagtgtagcatcattgatgaaataaataaaaactattgtaaaaaaagactaaataataatgtttttgttaattagtgtctaaaagaattttttgttaacgaactaaaaaaaatatttattataaaactcataggatattgtaaaaaaaaaaaaatcatagatgatataattttgtgtatttaataaaaaaaattcttttaatttcttaacaaatatcttaagaataatggttaacatttgtcaaataataaataaatatattatttaaaacttaaattaataaaaatatcaaagtagaaccatagatctttttcactctatcaatcaatacatgcctcctccaactcggatcctgacaattgacatgctgctcaaactttgctggctgtgagggaacaacactttcaccatattcaaactcttgggttgttatggacttctcatccatgtgatccttgcctaccctcttcaactccaatttagatatctttatacctcaacaactgctatgttgttttaca

SEQ ID NO: 305 - DNA, 5853 bp, Glycine max
  source 1..5853: mol_type = genomic DNA
tggtaagaaaaatacataatgggaataaatatgatttttttttattaatataaattaatagcattttgatagaaaaaatatttttttaaaattaatttatatataaataataaaaaaattaattatcagttcaaattaaaataatgataaaaaataaaatagattattaatcaatgttgatatgaaattttaataaataatataattattttttatttgtcaaatgtaatcaattaaattttactttttgaataattagtacttaaagataatattaattaaaaaacattgtcttttttaatgcaatatatgatatataacattataaagtttaaattgtcattttggttttccataattttttaaatttatgattttaattttcttgtattttaattataacatttgatttttctaattttataaatgaataatattggtccttcttattaagttaattataaattaacaaaaattattaattattaaaaaattaataataatcacacttctccataatattgtattttgtttcacctccactgccacataggagtccaccaatagtaacaatatattaggattaataattttttattaatattttaattattaataatttttatttaatttataattaattaaatatctttaataatcataattaataattaataatttaatgaggaccaaaaatctcaatttataaaactaaaaataaaaaaaaataaaaaatttagaagcaacaagattataatttagcatatgataaaatataatatatgatgataagaagaggatcctagatgattgcccttgataagttgaggtcgtaaagatggacggcacaggtgttcccaacactagaacgaatgccattggttggaacaagcaaaaggcgcatttctattggtccacgtcatcattagtgacatgttcgtgcgtcaaagcttcaagttcaggaattgaccaggtttgggcactacataaaagcctctcgctccctcgtgcaatttcaaaattacattacactctcttcgacctcgcatcgcaccttcaacttaacctattccacttgtaatcgtaaacgctttgctagaagaagagaccaagtgtgtctgtgtgtgtgagagagagagcaatggctggctcgtgggcacgccgttctctgattgttctagccatcatttccttcggtaatttcacctcctaatagatctgttcatgcttttcttttagcttttgcttaaatgcgcaagtggaaaaatgtaaccagatctcgctttgtttgaacctttttggatctgttttgtttgattcgtttcgtgttacgtagcggtagatcagtgactgagatctttagaagtaattgtttaggatttcgtaaatcgtgctgtgttgtgttcttcatttcagtgaagttctttgcgaactcgttagttctaggatcttacatgtttgtgtaatacgcgtttctctgcatctgacaatttcgtcaacagtgatcagttctagttgttattccgatttccgagggagcgttttgttggttttgtttttgaaaatgctaattgttgcaaattacttttcgtaaccaacacacgtgcctctgatttctgttaaatcagtttttatagtatttcgtaaccaacacacgtagtaccattgatttctgttaaatcaggttttttttaatatattttaaattttttgaatcaatgtttcgtgcaaatatgtttctaactaaccagctgcattctcgtttgttttttgttttttaagttgttgataaagattttcactgttaagccgagtgattagtattagccatggaaataagttttgttccattgtgctgcttaagatttttgctttcattgcatgcttttttcaaaggattggcgttttcgtatttgcgatttgaatatgacatcgagaagttttcctccggctgataattgaatacatatagaaaaaagtataaagtaaagtgtcttcatgttaattttgttaacgtattcatatcattattatcatttgtcaagcacaattatgtgcaaatgcagaaattaactgcgtttcgatgagtttaagtgttgtaaaaatttaactatgtaactaacattgagaaatttctccataggatgtctatttgcgatttccattgctaaggaggaagccaccaagttagggacggtcatcggcattgatcttggaacaacctattcatgtgtcggtgtttacaagaatggccatgttgaaatcatagccaacgaccaaggtaaccgtatcaccccatcgtgggttgctttcaccgacagtgagagactcattggggaggctgccaagaatcaggcagctgtcaacccagaaaggaccatctttgatgtcaagagacttatcggaagaaagtaagacttgctcaagttgttgatttttgacaatttgatttggtgggatcaattgttactgacttgcatctttttgcaggttcgaagataaggaagttcaaaaagacatgaagcttgttccttataagattgtcaacaaggatggaaaaccttacattcaggtgaaaattaaggatggtgagaccaaggtgttcagccctgaggaaatcagtgccatggttctgatcaagatgaaggaaactgcggaagcattcctcgggaagaaaattaatgatgctgtggtcactgtcccaggtaactggaagtctgaaacaatttgcgccttatttctccccttcaatttgattgttttcctcctgcttttgcttttattccaatttctcacatttttgtttcaaatgcacagcttacttcaatgatgctcagaggcaggccaccaaggatgctggtgtcattgctggtctcaatgttgctagaattatcaacgaacccactgccgctgccattgcctatggattggacaagaaaggtggcgagaagaacattctagtctttgatcttggtggtgggacctttgatgtcagtatcttgacaattgataacggtgtttttgaagttcttgctacaaatggagatactcatcttggaggtgagtacttttatacacatacacacaagagaatgaaatgaaattatatattctttccataaaattttctttctgatgctaatgtctgctatttctgtttccccttactaggtgaggattttgatcaaagaataatggagtacttcattaaattgatcaagaaaaagcatggaaaggatattagcaaggacaacagagcacttggaaagctgaggagagaggctgagcgtgcaaagagggcactcagcagccagcaccaggtccgcgtggaaattgaatcactttttgatggtgttgatttttctgagccactcacccgagctaggtttgaggagttgaacaatgacttgttccggaagaccatgggtccagtgaagaaggctatggaagatgctggattacagaagagtcagattgatgagattgttcttgttggtggaagcacaaggattccaaaggtacaacagcttttgaaggactactttgatggaaaggagccaaacaagggggtcaaccctgatgaagcagttgcctatggtgctgcagtgcaaggaagcattttgagtggagagggtggtgaagaaaccaaaggtaccatagtctgtaaatattatttatggaagtagattgctaagcattacactttctaattgttgtgtggcaatctctatccagatatccttctcctggatgtggctcccctcactctcggaattgaaactgttggtggagtcatgacaaagttgattcccagaaacactgttatcccgaccaagaaatctcaagtgttcaccacctaccaggaccagcagactaccgtctccattcaggtacggtgccattaaagggcatgatgcgtgtttttcttctaaatccaaaatgcaccactatctggtgaactatgatgggattgacttgaaacgattcactgcttttttcttaatacaggttttcgaaggtgagaggagtctcacaaaggattgtcgccttcttgggaaatttgatctgtctggaattccaccagctccaaggtttgttacctgcgttgatgatgcagtgtcctctctcattattgctccatatattaatgttagtaaattcattggtggtattatatttgggtaattgaacaggggcacccctcaaattgaagtgaccttcgaagttgatgccaacggcattctaaatgtgaaggcagaagacaagggaactggtaaatcagaaaagatcaccattacaaacgaaaagggacgtcttagccaggaagaaatagatagaatggttcgtgaagcagaagagtttgccgaggaagacaagaaggtgaaggagaggatcgatgctcgcaacagtcttgaaacctacgtatacaacatgaagaatcaggtcagtgacaaggacaagctcgcggacaagttggagtcagatgaaaaggagaaaattgagactgcagtgaaagaagcattggaatggctggatgacaaccagagtgtggagaaagaagattatgaagagaagctgaaggaggttgaagccgtttgcaacccaatcatcagtgctgtgtatcagagatcaggaggagccccaggtggtgcaggtggcgaaggcgaagacgaggatgattctcacgatgagctctagattagtctaaatttttatcatatatgggaaattaagaattcccctgcgctctgcgcttgcttttttggtgccgatgataagatacttgtgaaattacttttactttgtttttttgcttagttttacgaccaaacttcttcatgagtctggtttcacttctattctcttacgctcttcttttcgcgtgcttctccgttaaaatgtgctctgatgaaattaatccgtctctgcccatgccgaccataagtttttaattaagtctgtttgtaatttaaaacaggtaacttccgtaaaatattattcagccattttataaaactcacgaatatcaaatttctatcgattgttatttgttttttcacttttacctggagcttgtgaataaagttcaaagatggattcaccaatgtagcgtccggaagttagcgtgacgcgtttgagtgttatcgctttttattgtcagagaaaatagaaaaatagtaaaatataatggctgaaaatttagaataaatatttttgaatacaggcccagctgaaaacaccaaattagatttcacttcttttcttgaagaaatgaaaatacgacattttttagtattttttttatgtataatttttaaatcttaaaaaaagaaaattatttaaaaaaaataaaaaaatagaaacagaaaataaatacttaaatcaaggatgccatctgtaatttcggtttctaaaatgatgatttatgttgttttatcatttttttatacatggttatagtgtcatgtcatcatgcttgttttacatagtgcccgcacctcttgcctttctattctttaacaatggttattgaccaaggagggatactgttattgaatttgacgggattagacaaggcaatggagaagcggttatataccttgcccacacctacagaatatatacttctagtccagaactttttataggattaaattcatcgttgccaattatgttagtccctgtttggtcaatgtcgagaatgcggttcaaatgactagaagttagggatttatggtaacgaaattcgttgattttttttgtttagaaaaatcgtggttttgttcaaaatctgacattttgacattcttggttcatctatacgtcaaaatctatttcttctaaatctgtttt

SEQ ID NO: 306 - DNA, 5086 bp, Glycine max
  source 1..5086: mol_type = genomic DNA
ttttttaatgttaagattcattatttgtgttatttaggttcacaagtaaaaagattggtgaacaaaattgttgattgatttagcaattttcttatgcactaatttaaatatttttattattaaatgaaaaattatattaattttaataaaattgttagcattaaggattattttaaatattttaaaatgaaagatattttaataaggttatgttagacaaaattaactagaaagctaactaacaactagaaacttttaagttagcttattaaatcataatatttggtaaaattagttgttcaagtagtttaaaaatataaaatgacatatttaaaaaagataataaaaaaattgaataaatattttaaggataaaaaggaaacaaaatataaaaagttagaagattttaaaaaatgtttctccaagtaacatttcaaacaaaaaaaaaacgctaaaaactacttaaaaaaatttgtttatcgaacaattaaataagtttttcagatagtaagaaaagttagaagttagttgaaatggttttcctaatattgtataagaaaacattcacttaatttaaaacaaaaatttagtttattttctatgatattaaatacaaaattataattttttagtccttaacatcatttattagaggtaatgttaacaaaattgtaattataataataaataatttaatttttttaatgatattaacataaaattttatcacataattaacatttttttaaaatgatcacaaaagaaattatttcttcataaaataaaataaaaaagatttaataaaaagtaatgatacttgtacaattaaaccaattaacggatctcagccattgaaaatttgttgtgccacgtgtctgattaaaataaaaggaattggagatgttcatttcttagataaatgaagataacaatcacgcagagaatccactctcccctcttactggtaactacataaaaggatgcgcacgatactttcattagttgcatcgaacagagagagagagaatggcagcacttggtgggaatcgtgatgtgacaggaagccagaacagcgttgagatcgatgctctagctcgctttgctgttgaagaacacaacaaaaaacaggttttctttctttcttttttcttataaaagatgaaagaaaatgttaattatgctttgttctgcatttgtttgtttctcgagaaattcctaggatttgttttaaggtgttgctttttattgggtcaggccgatgatcggttttggccatgttaacgtttcttcggaaatacacatgttgaattagattttctatcttttcttttgttttatgaacaattattgacttttggaattttcgtctggggatagtagatagttggttaagtctatttttagaataattatgagtaaattgcacttatctctctcgtggtttcttgagattgcacacgctctcttacttgtaatatctttcaaacaattaaggagttagttgaatgtgtaagagatgtcaatcttttcaaacaattcagggagatagtgtatgagtagaaaaagaaagagtatcaaaagaaatttgactaaattacaggagtgttagtgtagtttaatctataattatttatagaacattcacgtcttttctctgaagtgagagagcttttgaaaaataagccaatatttccaatcatgcacttactctccaaaggttacggttgatatagtttttgatgttacaaatggtaaattaaatattgacttcaacgagtactctgaaattgacattaccgatcagtttcatagagtattatcaaatcaatcaatttagtttgcgaaatcagcagctatcagttaatgacattgaggactatattgattgatgtgtaccaaaatgaggatctagttgactgacaattgcaaagttaagaaccaaattgcttgttcatatcattaagcactaaattaattgattgttggaacctcaagagatttgttaagtagagtaagacataatcctgcatctaagaggttgcatgtttgaaccctcattcgtttatttggagtggggtaaatgtaagttcttctgtgaatgttctttgagcttggaggctttttctgtcttgtactggggcattacccctcccccaaaattttgttcaccaaaaattaattgattgttaggataaatttgcatttccattatgtcaaggaataaatagattggtagggtcaatttcaataaccacgaacgggcttctattttctttttattttgtggtaaatatgaattatattttatttttattgaattgtaaatggctatgcagaatgcccttttggagtttgaaaaggtggtaactgcgaaacagcaagtggtttctggtaccttgtacaccatcactttggaggcaaaagatggtgggcaaaagaaggtttatgaagccaaagtttgggagaagtcatggttgaacttcaaggaggtgcaagagttcaagcttgttggagatgcacctgcatagtctagtgcttaattaggtatttgataacattacacagtttcccctgcttgattattaattatgaaattgtttatggatgaatgcaaatcttcaatagtattactatcaacttcttttttgcttttgctattcttaagatggatcagaaactgaggttagaatgaatggggaactaagtggggtaacggagttaaagaactagaacttgaagtttggatcagtttttgatttacacattgggcattatttgtcagtacagtgcttgtgatattgatgattgataatgttcattcattttattggtgctttatataaagttgaacaagttgtagttttactggcatgtaattactatttactatctggtgtataggtttctatgtaacatgtcaataagttgttgattatcattgctataagatttgcgggaatttcattttttcattttttctgatgaatcagctttgagggtaatgacagtgatatattgtgaccatgaagtttgttaaacagttgatgaaattattcattcgagattcactccagtttttttttttttttttgcttcccctattctgatagataaattgcaccttagcatgacttttggaagtgaaacattttatcataaaatttctctgagtatttacggcacagggattgggggagaatgaccttttgatgtactttaaggatcaaggtggagtattatatgactaatttagtgctcaaaagtgcatttatttttttgagaaaaatcattttaaagtgagtcattttcagggttatcatttgctcaaattctcttgaacccatttacatttatttgcttgtcctgaatcatggtctctgtatactgcattccttttagtagcaatagttgtgggctgttagtccaatatgcattggtatatttctgtgttttaccattaacataacagctgaataattgtgggctgttgctgtggttctgccattaccttagttttgaactcaggatgaagtgttgaaccctacacccaattaagggatgggtattgacagagtattccctttagtgatttcaagaataacactcatgacttcacttattattaagtgattttccactcttgctctctttctgcctaataccataaaactttcaaaaggctaataatggattgcaaatcaacataactttatcttggaaatccgtgccaaccttcaatattaagtcaattttgattagagacatcaaaagcactttagttaccgcagctaaattttgtctctgttaacatatgccttcatgccccaagtagtattgaaacttctaaaggagcttttcttgatgtctcaggttgctgaagagtgaagaatgagacagcctggttcgaaggggaaaagcctaaggatatatcaaaggatcctatatgtataaaataaatgttgcttttttaccttcggtattgatatctgaagtctaatttgacatcctatatatgaatatatgatctatgtgtttctttctctccctacctctctctcttttaaagattcaaatttggttttactttttagccattgtaagtgtattaacatcaatacttaaatctatatctatatctacattataatctatatctatattataaacattgaagctcactgttggagaagtttttacacgtgacatgaccaaaagcatctggcaattttcaactctttgtaaagcatatcacttttagtcaacatcgtggagtttgtgtattatagtggaacttaaaaatcaaatttagttttactttttaggcattgtaagtatatcaaggcctaaattaatttatcaacgtcaaagattaaaaagattagtaattaataatgtaattagagattaatcttaccaaattgaatgaagttgtgatccatataacctatatcatctaagacgacaagactttgttattgttgttgtaatataaaaactaaagtgattgatagctctgatttgaggaatcaaaatatttttccacaatgtttaagcagtcataaggactagaggtggcattgctaagggctcatgactgagccatgatatggaggtgccagtccgaaggacacaccatagcacaaagatggtagtacatagggcacatgatagagcaacaggccggcgcaaggacaagtatgtggtttttcgtacctttacccatttctccaaaatcatctccttctttggttggaatggaattttttctccattctcatttccattggagatcgcgtatacatgttccctactcatcttcggccaataattataaaatatttttttgcaaaataattaaataaaaattattttgaaaaattgaacaaagttaaatgtattatttattcaagtggtaaagtttaggtgactaacttgtcataactaaatataaaatccagtcctataaaaattagatccccatcacctaaaaattattgaagacttgaaacatgaaaagagagcctaatgtcttataacttatatttgtggagtcttagtttcaatttttaaaataatagaatagaca

SEQ ID NO: 307 - DNA, 13349 bp, Glycine max
  source 1..13349: mol_type = genomic DNA
aaaatatgtaattttatgatgcaaccaccgttgttgatccaattaagcaagaataatcgttttttaaggaataatagccgttcttggcgagttaaatatatacgagtattttgatggtttgtttggctttttttctttctttctacagtcgtattttcccacctagaagaattttattccaaccattttgtttacatatacaaagatttgattctaaaacattggtaaacacattattctaaaagacatttaaacttaaatgtatctataattttttaaagttaaatgtatttatattatttaaaaacttgttttggaatgattttatatccaaatttattatgttatggtggacagttttcagttgggcttcaaaataataaacattcaatttaactacattaaatatatagaaaagaggtgatgtaacatttgtaaaaagttgtaatgcaatcttctttatttatttattgattttaaaaataattattttaaagtcattaattttttaattttaaaaataattattttaaagtaatttaagagcaaaattataaatttggtcccctatttgtctaacaattcaattttgattctcttataatttaattcatgaatttagtttgacatgttgtaatcttcttatttcagtctctaattttgatattaattacttatcttgattgtcatatatgttaagctttgattggaggttgatcactttatcgcgatttcattcaatgttaattaggtgcatggaattaaccgttccatacaagtataacacacgtttaacataaacaagacacatgcgtaatcaacctgagaaaaagttaaatgtctaattttgaaattgaagattaaaataagggaatttcaaaaagttgagaaactagaattaaattataaaaagaaaaacgaattttttaaaaaaattaggaagaataaatttgtaattttactaaatggtaatttatcatcgaataacataaataagcgaaagaaggtgtcgtgtgagcagagagaatattattagcgcctagagacaaagacgatcaattcatcacaagcaagttcccatgaccggtaacgagtttcgcttcttcttgtcctgcgatatcagtgttcctgtcaccttccgcgtcgagcgccttgaaggcaatttgccccttccgaatcccaaatcacccgatttaggtttgtttccccctcttttctaaaatgctcattctttttaagatccaattcaccaattaattaaactggatgattgcgcaattcataatttcagttactatttccttacagaaactaatgcccccacagagaatagaacaaaagagttgtttgtggagtgtgctttgtacattgatggtgcaccgtttggccttccaatgagaacaaggttattttatttttaatttaattgagctattttgcagtatatacttctcacatgactcgactttttagtataaaatttaccttgctagtttcaactgatgtactgattactgaataaaataattatcatggcttgagatttcttttgctgatttttctcttttataactactttcttttgcttttttaaaattaattttcggatgttttctcttgatacctcatatttgttactcaatcagctatgccataataatattacactgacattttattgtatttatggattttgatggtgaaggttggagtcctcaggaccatcatattgttggaatgagctcatcactttgacaactaaatatcgagacttaactgcccagtcacaactcacgttcactgtaagttgcaactttagcttacaagcttatttatacgttcttcaaatagtgatggcacaagactcgttctgtgtccatctattgtagcaagaattgcaatctggttatgttttgccttgcataaaatagaattgtgtaaattttattagcttctagccttctacaaaatttacttaaaaatttgtgaagtgagtttttatattttggtaatattgttgtgtaaataggtttgggatctttcgcatggtgaaggattaattggaggagccacaattcttctcttcaacaacaaaaagcagctcaaaactgggaagcaaaagcttaggctttgggcaggaaaagaggcagatggaacattccctactagtacacctggaaaggtaattaaaattttaagtgaacttaggttccattttttgttcaattttatgaattttttcagtcctaataagcatactttgaattgtcctcattaggtccctaggcatgaacgtggggaattggagcgattagaaaagcttgtgaataagtatgaacgaggtcaaattcaacgggtggactggctggatcgcctgacatttaaaactatggagagaatcaaggaacgcgaaagcttgaaaaatggaagttctcatttgtacctggttgtggacttctgtagttttgagcatcgagttgtttttcaggtattcttgcctcctagttgtgacattgcccaaaggattaatctcacaacaatgcctggggggatatttagtcaaataacaaatattctttaaaatgttaaaatgatgtactggtttccccctcccagtatgtgatatattcctgcatcaaatgcttttgtatttccgatcatcatgttaagtttaacaactaagtaaattcaaatgtacatgggattcctagaatgtaatcttggcctctcaggtttgcaagcatcctacatttctaagactattaacatttcatgcatataccatataagttattgagttaacttaccctgcatactggtgtgaagttgccagtttacctttacgaagcaacccctgaagttattgatgcagttttttttttcttttttaataatataataaatgctgatacagatcctacatgtgcattaactcatatttgttagaaaatgtaggaatcaggtgcaaatttcttgtttccatcacctatagcctccaccaatgatattgttgttgtctgggatccagaagtgggaaagataaatccctctgagcacaaacagttaaagctggccaggagtttgacccgtggtgtcatagacagagatctgaagccaagctcaaatgagagaaagtaagcttaagcttttgtgtctaaagataatttccttgctatatctatgatcagattaataggaatgatttacctcttcagtacttgaaatggttaatttgctctgtgacatatatagtcaatggagaagcgaacgcaattaacatgttaatgaagtttcatttccaccaatgaagagtgtacactttaaagaaaggggatatatatatatatatatatatatatatatatatatatatatatatattgctgaattaaagaaaggggacattttcatatcagagttgatgcaacacttcaaaatacatgtgcacgtatcaaagtgtatcaatgtcagtgtcaatgatcattcttcttagatagccacattttaatggcaggtggttctaaactaaatgattttgtgaaggaaaagttattaatgtgaaataattgaaataaggtatttacttctaggaccatgttgtccttactttttgaagtgatttagaccattttctgtgagataaacgaaagcaaataaaccatcaaaatatcagttgaagaaatttttggattgcattgttatttatattagctgcaaaattttatcaagtgttactagtagctcttttggcataaaactttttcttttcttttttctagttggttttctctttggttctgttatgaacaatgtctcttccctctataataataataacaataataatattgtgcttctttatcttttttaagatataaatgattgtttaacactttaactgttttatttgctcctttatgtcaaggtccattcagcgaatactaaaatatccaccgacaaggactttgagtggagatgagaggcagctcttgtggaaatttcgattctctttgatgtctgaaaagagggctcttacaaagttcctgcgttgtgttgaatggagtgatgtccaggttggcctttattatcttggaaactagtaatggatattatatatgatttcaggtatgctataggtctggtacttaaatgtaaggaggtcttctcatgagtcatgacaaccaaaaccttaattgtggctttctccatactgcatcaattcattcctggggggaaaaataaaattgaagaattttatatttagtgaaattgattgtgtattggctgatttttttttttttttttgtaatcaattggaaatcttagtgcatctttcctttagagtcaaatttatttccaaaagggtatctagtgtgaaattctgttctacaggtgaagttgggaatatatatatatatatatatatatatatatatatatattagaatattgtaagagagtagcagttattcaactgcactcttgggtagtttactctagttaatactcatttctaaaatctttcatttttttcaaaatatcttcatctttagaactctgttaatacacgttaatgaatttaatgcgttgtgcagcagacttttggggtctcatgtcattgtctctaactctattcaaatatgtaaactttttctcccctattcactgaacatgtaattgagccctagttatctaatgttgggtataataaagcatagatcaagaatgaccttaagtgaaaccattaaaaaggaatttggtttaaatggcctctgtagtggcttttgatggaacacaatggtgccatttctttcagtagcagaaccccactagttggatatgggaaaaaaaagctttgctttagtttttttgttaattgatatttgattttttgtttcttgaataattatcttatctctattttttttctcttgaattcttattgctaaaaaaacacgggtaaaaattatcattgtccaatgctgtttttatccaggaagcaaaacaagcattagagttgatgggcaagtgggaaatgattgatgtttgtgatgcactggaacttttgtcgcctgtttttgaaagtgaagaggtaattttacagagatattagtgaaaattctacccaatattggtgtaggtctttgggtttatatgaattaggtttgcagtacaatgtagtgcaatatagtgcggagaactctctacgcattaatcatattcgtaatgacctcgacacgttaatcacacgagtaatactcttactgtcaacacacatactagtaagaactaagaaagtatccctctagttttcctacatattgcttgttagtttgaaaaagaaatagtaaaaggaaaatttatcagatagagaagtggaaaattaccactagcaactaggggagagaataatatatcttccacaacagacagaactggatttaatgaagaacaaatgaatatagtaaatcagcccaaaatctgtagcaagtgtaggagcaaaatgccattgcactcccagccttactctgttgttatagatgtatcacttaatatctcaattattttttttactcaataggagaaatttatacacctatagagaactatttactatacgaggccgtttctcaactgcttcattccaggtccgtgcttatgcagttagtgttcttgaaagagctgatgatgaagaacttcagtgttatttgcttcaattggttcaagctcttcggtttgagcgttctgacaaatctcgcctttctcatttccttgtccagcgtggtacatgcatgagagtttaagagctatttcaggtgctgtttctagttatatttggctttttgctgaaagtaacctaaattttgacagcattacgcaatattgaattggcaagctttcttcgctggtatgtggctgttgaactttatgatcctgcatatgccaaacgattttactgcacttatgagattctggaggagaatatgatgaaggtttgaacttatatttcttaatacctgaacatttgctcagtaagttttgcttctgcgatgcttattaatgtgataaataattgtctcctttttacatttgaaaaatagtttttcgagatgttgtacattgctttatgttttctttatttggcctaaacctaatccatttctgcatggttcgtaactgtactcctacattataaattctttccatatttgaaatttgtcttcttctatgagtaagttgatttctttaataatttttgtttccataatgtacaccttgaagaagcctaacagatctataattattagacaatgtaataattttattcttgaataaaaaaattgcaggtgtaacctggcttatgtaattatgtataatgatttcatttgtgtggcataattttttttattctatatcatgcaacaattttttgataaaggaatctaactgatgcaagtctgcaacatattaagttcattaataaatttaatgtgatagaaactagaaagctagttggattaattacttccggaacttgacaattatgccccattgtctcagatagcagctggtgttaatggagaggaagatgggtttaaacagtggcagagtttggtacgccagacagaattgactgctcagttgtgttcaatcactagagaagtaaggaatgttcgtggtaatacacagaagaagattgaaaagctgagacaactactttctggtcttcttagtgaacttacctattttgatgaggtaaatatctcacatgaagctgtatcgtagtttattattttcatcttttactttacccttttagttaatgatgcatcttgaagaaactatttatttccaataattatatctagcaaattcttagaaggttcttcaactgtatgtttattgttgctttatttcacttgtagccaatacgatcacctttggcaccaggtgtcctcattgctggaattgtaccttcagagtcatcaatatttaaaagtgcattgcatcctttgcgcctttcttttagaacagcaaatggtggaacatgcaaaatcatatttaaaaagggtgacgatcttcggcaggaccagttggtattcctaccaatccttcttctgtcaccctgttatgcatgcaaatgaatacctgtgtacatgtgtggattgatgcaccaaaaaccacgtgcctgtccatgtgctcacacacgcactcatgatggatatttagaagacgtgagttgaattacataaatgttggctttatgtaggttgttcaaatggtatcactaatggatcgattgcttaagttggaaaatcttgatctgcacctaacaccatacaaggtgctagcaactggacaagatgaaggcatgttggaatttattccatctcgctcattggcacaggtatggtgatatactttttttaaaagttgtttcttgtattagcacgtagtcactgcttctttttgtgacttaaaagagttgagagaattagggagagaagaggagattgagaaaatcaatattattcaacccaactgtaactgattacaaagatgagtatatagttggataactgccaactaacctaactgtcaaccaacctaagctagttgacagctgttacaaagctgttaggcactaactgactaaattatcaacaactgataacagctaactactaactacagtagttagaatatcagttaactgacagaaacaaaaagaaacactgcgagtaatgtattctctcttatactcccccacaagctcatgaggggttggaagaatgtctttcaactactctgagcttgggttggacctgaatgaaagaaatgaaggagatagagccttggtcagaatatcagccagttgatccatggcaggaacatgaacaacattgagttgtttggtgagaactttctctctgacaaaaaatagatccagctccatatgcttggctcttgagtgaaggacaggattatgagctaatgaaacagtgctggtgttgtcacacagaataataggagtagtgtaagctacttggagttcagaaagaagagattgaatgcaagtaacttctgctgcaataagagccatgcttctatattctgcctcagtactagaccttgcaacaactgattgcttcttagaccaccaagagatgagttcaggtccaagaaaaatagcagctccagaagtagacctcctatcatcaggatcagagacccaatctgcatcataataggcatgaagaggaaagggatgcctaagagaagcagactgaaagtgtagaccccaagaaacagtactgatgagataccttagaatccttttcgcagccaaccagtgttgctcagaaggttcagacatgaactgacaaaccttgttgacagagaaactaatctctggtcttgtaatagtagcatactgcaaagcaccaaatatggacctatgtaaggtaggatcaggaaagtcttcagaaccaaacttggtcaatttacaacccccaaccataggagaagagataggatttgattcatccattttagtcttggccaagagatccctgatattactttgattgagttaaaatgagagaaccatcattctgtctttgaacttcaatacccaaaaggtagtccaagtcaccaagatctttgagggagaaaacagaattcagttttgaaacaagagaatgaatcaaagtgttgttaccgtgataatgatatcatctacataaactaagatgtagacaacagactgattctcagaaaaaacaaagagagaaggatcacatttgcttgaagaaagcttgaagctgagaagagtagcttttagtttgtcaaaccaggctctaggagcctgctttaggtcataaatagctttatgtagtctgcatactcgagtcttattggaagagacaaatccaggaggtttagtcatgtaaacctcttcctcaagaatgccattaagaaaagcaatgttgacatcaagctgttgaaggggacagttgtgagaaatagctagagaaagaatcaacctaacagtcacaggtttgattacaggaggaaaggtctcctaataatcaaatcccaactgttggtgaaaacccttagcagcaagcctagctttatacttgttgactgagccatctggattttcctttactctaaacacccacttacacccaattgctgttttagtaggagggagatcaaccaaactccaagtaccattccttattaaagcatcatattctgattccatagctgtgtaccaagaaggatcagcaagagcagctttggttgattggggttcaaaatgagctagtaaagattccttattaaatctctcatatgactgaaggtttcttctacattgatatatagtaagactttaattttgacccatcatgattttttcaatacgatgttgtaacatatttacctttgttaactgacaaaggcattgttaatctaatgctttggtctaagttttatggattttgtctttactttcataactgcttttacattgtgaataatttggtattatcagttgaaggagttaaaaatgattcattatctgtaagcatcatgacatagtagaaaatattaaaaatatctggaattttgtagctttgttttagcatgtgcacttatttatgtataagcacaatttttgtccaagtaagtttatgtttagttgctaatatttttgtgaaaggtttttttattttatttcttcagaattcagatagtgttttacaaaattgttcacagtaggaattgtaatgcctgtcaggttgctaattgctttatgtggttcctttgatatttgctatagaaatttatgaattgcgtataaaagttgtatacttattttttgacattagtaaacgatcatgttggttgtattgtaggatacacaatcttgcaattggtagactaatatataatcttttcaccaacaaaaaagacttatatataatttttcatgtctagattttgtcagagaatcgtagcatcataagctatttgcaaaagtttcatcctgatgaccatgggccttttggaattacagccacctgccttgaaacatttataaaaagctgtgctggatactctgttataacatatatacttggtatcggagacaggtgattgttgattttattcattacatgtcattttatatctaataaataactgagactgggttcaccagaaactgctacatgctggccagaaaatacaggtattggccagttgccggaaagtgcaggtcaggatactgggttgcacgaaggaggcagaggttttaaaccataatgctagtgtttaaacagtggccactggctgatctgccattatagtgcgctattgacaacctaggtttctattgaacaactccccactcattccatcaattaaagaatatgaaggctaaaagcaggaagaaaggaggttgaaaataaatgaagcaggctctcaaccaatttctaaccaaaaatcttaatattttgttatcaagtgttgctgtcttgctgacattgtgtaacttaactgtcttgaaaatttgaatttatactgcatataacttacagacatggaactaaacatataactcacatgttggattatgttgaaatacaaactaacgtgattttagattaatatttgcatgtttggttccatgttaaaaaaactatagatagtttgtgttttgataaaaaataattatattaaattttactactaattttagaataaaaacatttaaacataaattacttcactcaaccaattttaaccaaagtcaattttacaaaaataatttcattgaatttatattttgtccatatttggagtgattttgttttctttggcaggcatttagacaatctcctccttagaaatgatggaggtcttttccatgttgattttggttttattcttggccgagatcctaagccatttccaccaccaatgaagctttgcaaggaaatggttgaggctatgggtggagctgaaaggtacagttctcattagatgattcactttagattcaagactgtggttatgtgatctgtagcttaaattgtgaaatagtgatttgtttctttgttccccatgcagccaatattatacaaggttcaagtcctattgttgtgaagcatacaacattcttcgcaaatccagtaacctaattttgaatctattttacctaatggcgggttccaatattcctgatatagcttctgatcctgaaaaggggattcttaaggtaagctcccttgtgtttcaataaataggtgaaaaatgttcatttgttcttataccaggacattttcgctgtgcagcttcaggaaaagtttcggttggacttggatgatgaagccagtatacatttcttccaggatcttatcaatgagagtgtgagtgcattattccctcagatggttgagactatccatcgttgggctcaatattggcggtaaccccaatatttattgggtgttattacaccaagtaattaaccaggtaatttcttattctattttgaggaaaaacaggtagaaccacccaatttgtattttgactgagatagtttttaccatacgactataagttttgatttcttttctcttttttttttaatacaattttgtgagcacgacttttaagctgtcaaattaaatcataacctaaccactcggtccaaagcacctccccttggctcttaaaaatggaacatcatagtacctgcatttttcattccttttgccgaatctgcagcattttctgtcgaacagaacgattttatctactgaaaacttctgcatgatagacaaattgaaatgaaagttatttttggtttctttctcacattctctctcttgtttccagcatctgatgctgtctttttaggcttcttcgaagcttaaaacgtatgtggttttatcttctcttggaactccacactcagatcccactgcagctgtatgcgcttctaatttctgaactaattatcctgaaggccacttagtgacattgtctatgtaaataaattagttctctttcgctcttctggttacggttgcttcaagactgcagcataacttaaaaaatcgtatcatacacaaactaatggttgtttaagtgaaaccatcctatttcatttttgtaaataactcttgcctggttataatctgtagtttgatatatatgtaaagtaacttttagttatgatgtttggccactttgctggggtaaattatcaaaactgtatctgtaagaactgttgatttatttttatattaataataaattttttattattttaaaatttaaaatgcaaatagctagtatattatagagaaaataatatatgcctttataatgttaagattttttctattatcatttactcataaattatcatttatacttagtttgttgactttaataataactatttttaaagtcataaaagattatttctaattagttaaatagtgtaaaaaaaaattttgcccattaaactctagaagctttgaaagaatcaatagctggtacttttcgttattttagtaaaaggaataaaataattctgatacccttgtttctattgtaaaggccattctgtgataaaaaaaaaaaaaaaaaatagttctaggtttacctctgcgttgaggctgccaaatgcaacaacttagaacattacatcagtctaactttgccctgacgagttcatgtttggtagaagtttgacccacccaaacggaaaatcggagactcattaaacttgattttgtttcatgcaagtttatgtcatgtttggatgaaatttaagaatgaaataaataatatcatactcaaactgaagaacgtctcccttgaggttaataggttattggtgaaccagtgagttattaattaaattgtgtaaattgctatatatttaaaaaatttaaaaattataacttatattatactaaaaaattattaaaaaaaataaccatattctactttaaaattccaatatatatatatatatatatatatatatatatatatatatatatatatatatatattaatattgacagtaagaatatacgtgaatgtagaaggttttctttttaaaaaagtacaaaacaagtaaaatatattttttattaaattttttttaaagtttaatattcagaaataaaagaattcgtataatcaatagtacagccatatttttttgttttatagtcacgtaattacaaggtaaaaaaattacgtgattagcgaaccttatgaaacagaagagtccaaataaataataaataaaa

SEQ ID NO: 308 - DNA, 3630 bp, Glycine max
  source 1..3630: mol_type = genomic DNA
acgtaaatgtcaataattatttgttgactgaaaatgtcaatcttttttttatcaaaatgtcaatatgttctattggaccaaaatgtcaataagttaacattattggatgaaactgtcaataattttttattgaactaatttgttagatccgaaatttcatttaagagtaaaatataacgttaggataaattttcatcattttttatcgttacaagtataacattagaataattacttaaaaaatatattaacaaacataatttaaaataaatataatattagcgataatattgattatcaatcataatttgtttgtcacaatagaaattatccaaaataaacattataccaatttaccaaaataaacattataacaatgtatcaatccttataaatttttccgaattttaataattagtcacaatatgctataaataaaaaataaatatatttcatatttcacttatttgaatcttgcttattttattagcaatgacggataaaaattaacaattaaatatatttgttacactttttatatttttgaagattaaattttgtattttgatttttttactgtgaacgaattacacaacgattaacattgtttggtttgagtagaaagcaaggtctcaggttttattgtcattttaatactaacccaacgattaacattgcaggaatgattactgatatcgaaataaatccataaaaagtcactaacattgttggtttaagtagaaagcaaggtctcatgactagaaacattttgttcaatttttgtccttttaatttacaatatcaatgaaacatttttattttttctaatttatctttaacaatatacagggaagtgaaaaaaataagaaataaatatataaatgagtgaaaatataattaatatgaaaaataagagatatattaggaaatgcatataatgattttcgtgaaatgtaaaatattaaatttcctttttaatattaaaacggcaggttagctcgaggagcctacggtttggcattgagtgtgaaacaggctaataaatgtgagtggttcaccgccgcaacttccaatgtgcgagcacttactcgtctcactgtcttgctatatttgggtgagaacacagaggatagtggagttcaacgagatggagcaaataaagcacagaacagttgaagtgaatggcataaaaatgcatgttgcagagaaaggagagggtccagtggtgttgttcctccacggcttccctgagctctggtactcatggcgccatcagattctctctctcagctccctcggctaccgcgccgtcgctcccgatctccgtggctacggtgacaccgaagcaccaccttcaatcagcagctacaactgcttccacatagtgggtgatctcgttgcgcttattgactctctgggtgtccaacaagtgttccttgtggctcatgactggggagccatcataggttggtatctatgcatgtttcgccctgacaaagttaaggcctatgtctgcctcagtgtccctctcctccgcagagacccaaacatcagaacggtggatggcatgcgtgctttgtatggagacgactactatgtctgcagatttcaggtttattaattaattctctcattttgcttatttttatcccacccttgtttttctttctctttctaattaactttgcacgaaatttaatttgtttctgtgaaatggggtcggaagattgtagtaccagatgcgaattattgtttttaaaccgtgtgtgtgtaactgcagaaaccaggggaaatggaggctcagatggctgaagttggcactgagtatgttctcgaaaacatccttacaactcgcaatcctggtcctccaattcttcccaagggaaggtttcaattcaatccagaaatgcccaacaccttgccctcttggctcacagaagaagatctcgcctattatgtctccaaatttgagaaaaccggattcactggacccttgaactactacagaaatttcaacttgtaatttcttgattctccgtatttgcccgggataattgttttccactgctctaagttaatgtttctttcttgggaaaatatttgttcaacatgacgggatcccaataaaaaaagaccattaattaattaattattgtatgtatttgcagaaattgggagttgacggcaccatggacaggagggcaaatcaaggtgcccgtaaaatacataacaggtgagttggacatggtatacaactcgctgaacttgaaggagtatatccacggcggagggttcaagcaagatgtgccaaatttagaacaagtgattgtgcagaaaggagtggctcacttcaataatcaagaagcagcagaggaaatcgataattacatatacgattttatcaacaagttctgatcttgtccaaaaacgaattcaaccagatataaagtcgcagctgaagtgaaagggtgttataattgcgcttttgttttgatatttaaggtatcgagatcttttttatgggcaggattcatcaactgcagaaaacctccataccatcaaccttcctatgcttgtttgtattaattaactgataataatactgtatggtttggtacttgctaaataaacttagtcttgtcatgcaaatggtatatcttaaaaaatgttttgaaatatgtgtatttggaactaagcttcaatgcgtgtgtgtattatctcgacataatctcgtagaaaatcaagtgagggaaatttagtttttgccattagagttttttcgcagttgcataatataaactgtttaatgaattaattgtttttaaacatggcaaaaagatttattaaagaaaaggcaatggataaccacaaggtgtgacaaggtcacgccccaaagtctgtaataccaagcaaaccagagtatgctaagtgcttacaacccatcccacgacttcagacaaccaatgtaaaaacactggttatcctataacagaaaatataccacccaattcatctcatataccaagcctagctcccaaagtgatgtaacagaaaatcttaattagaaacagtccaatactacccaccctgcataattcagtgagagtactgtgtaatgagttaataacttttataatcatggcaaatgagaatataaatccctcattggtgagcaacctaacccattacaaatcattcacgttaaaagctcagtagtcgataattataattaaattattatgatattaatttcaaaaactaatattatatattataatttaaaattattcttgcaataagaaaatgttattattttcgtcgtaaaggaaaagaatgaatcacattaactaaaaaaaggaaatgggtttatcagtttttaaacatgtttttagttatcgaaagtttaggaagaatagatgatgatgtcttagtacaagaaagaaagattttgggcacaaagagttacaacttattttgtacatacaaaataggagtagaaggttatatttttcgcttcaaaaagaggagtagaattttgtacataccacttattttaattagtacatgcatggatttggatgaattgcgaaaattcaagctcaaatttatttgatctagtctaatttgtct

SEQ ID NO: 309 - DNA, 3457 bp, Glycine max
  source 1..3457: mol_type = genomic DNA
atacccaacaatttgtttgagtattctttgattgtctctgactctttcatcctttgaagctcaaatttcctccttaaatttagcacttgcatgcttcgtattctatcatccccagcgtattcctctttcagataatcccaaattgctttgggtgatttaagagtcatgattctgatgaatatcatttgtgaaacaccagtgaacaaacatgacctcgcctttgccttcttcatctttctttccttgtgatttttaatttggaccatggtgggattttcaggcagcggatatatttcataatcctcttccacagcatcccacaaatccaaagactccatgtaggattgcattttcacttcacaaagatcataattctctccatcaaagattggaagagttatgtgggaaaaacttgcttcaccttccatggtagaggtcccgtaagaataaggctctcgataccaatggttggttttgaggaggaaattataaaaaacagaggagagaaaagagacaatacgtatgtgaaggaaatagaattattttattctaattcaaattattctcagcagcgatacaataaatagcaaaagatacactaattagataacaagatattaacaaaacataatattaaaactaacttgctccttaaaaataggaaccacttaaaactgccttactcctacaatataggaaatcaacttatttactaaatcttatctttaaaagctgaaaaaaaatattatacaattacaaaagtatatcataaacacatgttaatgcgagaatgataaaaagtatttaaaaaaaactcatataataaacttgctttaaaaatgtccttagcgtgcagagcatgggatatttgagtagtagtttttcttaaagtgtgggacattgcataatatataccagtgatcacgactcgcgaggttcacgctttgctcggtactataaaggaaagcatggggtctcttgtcatcttcataagaggaaagagtagaaacgtgaaccagaaccagaatggatcttcaacaacgaccactgaaacttcactttattccttacctgtcaccggggcatgtgatccctctctgcggcattgcaacactcttcgcctcacgcgggcagcacgtgacggtgatcaccactccctactacgcccaaatcctccgcaagtcaagcccctccctccaactccacgtcgttgactttcccgccaaagatgtgggccttcccgacggcgtcgaaatcaagtccgctgtcaccgacctcgctgacactgcaaagttctaccaagccgccatgctcctccgcagacccatctcccatttcatggaccagcacccacctgattgcatcgtcgccgacaccatgtattcctgggcggatgacgtggccaacaacctccgcatcccacgacttgccttcaacggataccccctcttctccggcgccgccatgaagtgcgtcatatcacaccccgaactccattccgacacgggccctttcgtcatccccgattttcctcaccgcgtcaccatgccctccagaccacccaagatggccaccgccttcatggatcatctcctcaaaatagagctcaagagccacggcctcatcgtgaacagcttcgccgagctggacggagaagagtgcatccagcactacgagaaaagcacgggtcacaaggcttggcatcttgggccagcttgtctggttggaaaaagggatcaagagaggggcgagaagagcgtggtgagccagaacgagtgtctcacttggctcgaccccaagccaactaactcggttgtctacgtatccttcggaagcgtctgtcattttccagataaacagctttacgagattgcatgtgcgttggaacagagtgggaagtcattcatatggattgttccagagaagaaagggaaggaatacgagaatgagagcgaggaggagaaggaaaaatggcttccaaaagggtttgaggagagaaacagggagaaggggatgattgttaaagggtgggccccgcagctcctcatcctggcccacccggctgtgggtggcttcctctcgcattgcggctggaactcctccttggaggccgtcaccgccggggttcccatgatcacgtggccggtcatggcggatcagttttacaacgagaaactcataactgaggtgcgggggattggggtggaggtgggtgccaccgagtggagactcgttggttatggggagagggagaagctggtcaccagagataccattgagactgccatcaaaaggttgatgggcggtggcgatgaagctcaaaacatcagacgccgctcggaagagcttgcggaaaaggctaaacaatcccttcaggaaggaggttcatcccacaacaggttaacgaccctcattgctgatctcatgcgcttgagggactctaagtcggccacctgatttcttgcgccatgcccctacaattataactcttccctagttataagaatatctattatgaattagtaaataaacagatttacttactaacttagtaagttcattttagtgcgttaagttgttgtaaactttttgttgagttgagaataaaggtgagtgaatttgatttgttcctatgaacctttgaaacatgtcccttattttatctatttattttctgtagttccccaaaatcgacttttgctaataatacactctcatcacatgttttgagaggctacattcaaataagccaaacccagtggcagttcaatgttatattttctcagtacactacgccttcttttgttctctaaaagttaggcaatcacacgtcttattaatgaaagaccctaacatgcatatgtgagtgtcaaacctgagagttaccattataggatactgggttcctgcataatacagaagtagcagaaatgaaggatcacacaaatcagagcctatgctcaagattctctacccagactacgtaaaaaactcctcataatttatctctacatccactcctttattctatcatttcctttaactaacttactgctagcttacccttcactcacccctaatctcattgcctactttctttttgcctagtgtagactctcctctccatattttgggcctttcataccttggcccatcagtaggctcatcctcatggtctctttaacatatttcttgttaacggatatatatttgttttgtagacacgcgtttcataccaaatatggagcctttgaaagttcggaaggtcttggatatgaaaaggcagtttcttacaaattgtaaaccattagatatttcttgctcttgttatgtagcctctcattttttatttgtgattctcctctaatgtaaaaccaaggatccaaaatcatgcaaaattttgaaacttttatatttattaataattaatagttcgggttttgggtggatggagtag

SEQ ID NO: 310 - DNA, 3428 bp, Glycine max
  source 1..3428: mol_type = genomic DNA
cgattatttcctaataattgctgtacttcacaagtcacattaatttgttgaccaacagtatctcgacccttaactatcagagcgttgtaaatattaggcatcttacctgggggaaaagctacatctagtaccggaccaattatttgggcgatacgtcccagattttttttttcaagcgcagaaacctcaggaccagaagtagtaggattgattcgcatataaaaatagattcaaattttttccggaaaatttttgaaatcaaaaagaaatgttcgataacaaagcaagttgatcggttaattcaataataaataagaaatgggagttagtactccatttttttgataccattcgaccaatccaattaaattgtttacttattcaatttcaataattgaattcttaagtttatcccagtcatttttaaaatttcaattggataaaatctttcgaaagttttttatttttttctatcattatagacaatatcatctatattctctatggaagtcgaacctgaaccttatttacaattctttttttttcaatatcatcagctttcgtatttcatcagtagacaatttatacttagcatatttttttacctactttttttcccgggagaagtctgcctatttttacatctaggatttacatatacaacatatatcactgtcaagattaagagtgaatttttggattatttagattagatatttcgattccaaaattaaaaaaagggataggagattaaaaattgaaaaaaaaaaaacaaaaattgggttgcgccatacatataaaagagtatacaataatgatgtatttgacaaatcaaataccatcgtttaataataacgaaccttggggattaattgataatattagtttattatttgggaaagattcctgtgaaatgaaagatttcattaactcctaagtcatgtcgagtagaccttgttgtttcgagaattcttaattcatgagttgtagggagggatttatgtcaccacaaacagagactaaagcaagtgttgggttcaaagctggtgttaaagattataaattgacttattatactcctgactatgaaaccaaagatactgatatcttggcagcattccgagtaactcctcaaccaggagttccgcctgaagaagcaggtgccgcggtagccgccgaatcttctactggtacatggacaactgtgtggaccgatgggcttaccagtcttgatcgttacaaagggcgatgctacggccttgaacctgttgctggggaagaaaatcaatatattgcttatgtagcttatcccttagacctttttgaagaaggttctgttactaacatgtttacttccattgtcggtaatgtatttgggttcaaggccctgcgtgctctacgtctggaggatttgcgaatccctactgcttatattaaaactttccaaggtccgcctcatggcatccaagttgagagagataaattgaacaagtatggtcgtcccctattaggatgtactattaaacctaaattggggttatccgctaagaattatggtagagctgtttatgaatgtcttcgtgggggacttgattttaccaaagatgatgaaaatgtgaattcccaaccatttatgcgttggagagaccgtttcttattttgtgccgaagccatttttaaatcacaggctgaaacaggtgaaatcaaagggcattacttgaatgcaactgcgggtacatgcgaagaaatgatgaaaagagctgtatttgccagagaattaggcgttcctatcgtaatgcatgattatttaacggggggattcactgcaaatactagcttggctcattattgccgagataatggtctacttcttcatatacaccgtgcaatgcatgcagttatcgacagacaaaagaatcatggtatgcactttcgtgtactagctaaagcattacgtttgtctggtggagatcatgttcacgccggtaccgtagtaggtaaacttgaaggggaaagagaaatcactttaggttttgttgatttactacgtgatgattttgttgaaaaagatcgaagtcgcggtatttatttcactcaggattgggtttctctaccaggtgttttgcctgtagcttcgggaggtattcacgtttggcatatgcctgctctgaccgagatctttggggatgattctgtactccaatttggcggaggaactttaggacacccttggggaaatgcaccaggtgctgtagctaatcgagtagctcttgaagcatgtgtgcaggctcgaaatgaaggacgcgatcttgctcgtgaaggtaatgaaattatccgtgaggctagcaaatggagtcctgaattagctgctgcttgtgaagtatggaaggagatcaaatttgaattcgaagcaatggatactttgtaagcagagaattaattgcaattaaactcggcccaatcttttcctaaaaggattgagccgaatacaatactacaaacaatactacaatacaaagatacttattatctaaagatacttattatatatatatatatatatttatatatatatatatattagtttttgttttgtattggaatagattggaatagaaaggtggtaagcagacgagattttacgaaaaaagttattccaatttctaagggaagttgctttatttttttctatttctatattaaatatattaaaattccatttttatatttatttatagatttcgattatagatttcgataatttatagatttcgatcattttttataagtttttagtttagaattcgaatagtttagaattcgaatctaataaaatttatatattaaaagaatttttgttataaataattataacaattataacttataacataataatagaatttctaatatttgaaatagaaaatatagtcttaatgaaatattaatatttcattactattagatttctattttaaattttctaatttatcatttttattttattcgtttgttttctcgattgtattctttttcaatactaatattgacaatagtgtatcaaataaatataatccgatcgtgagtaaattgatcaatttactcacgtgaaataggctttattacttcatcaaatggtaggttcattggattttctgcgatacaaccaataaattcttttttgattaaaaggtaagtaattcaattatatataataattatatataataatgtataacatagtagataaagaggtggtataccatttttttttagaattttttttttgttttatctgttcatttgtatgttgagaatcaattcgacttcaacattttgagtttttctatttttttgaatgtctgatattttattagacaattcaatcttttcattttattgtttttattgcgattggatatatacac

SEQ ID NO: 311 - DNA, 3182 bp, Glycine max
  source 1..3182: mol_type = genomic DNA
ccacttttgactaaaaaaagaaaatattttgagaaagataaaaaaaaactaatgaatttcaaaatttttctttggccaaaatatcgattagaagatttagcttgtataaatcgatattggtttaatacccataatggaagccgtttcagtatagtaaggatacatatgtatccgcgaatgaaaattcgttaatccaaatttgtcttctatttaccatatttatatggtaaatagaagacaaattaatatctatatctatctatatagatagatatagatacataacataaataaagacacgcattatggtatggcattgatactaattcactgatatataccttagataaaaaaagaatccacaaaattatgttttttttaagtataccattttttatggtgaatctataaaaaaagtctcctttatatctatttaaattgcatggattccattttttttatttataagaattaattcgattgtaaaaaaatcaagaattcttaagtaaattaagtaaattcagatttatataaaaaattcaaaattagtgtcattactattactgatcaatcaaaatatctatcaaaagtaaaaagcgaagagaagggaaaaactttaatttttttatggtaaaaaattcaattatacctgttatttcacaagaaaaaaaagaaaaaaacccaggatcggttgaatttcaaatattcaaatttaccgatagaatacgaagacttacttcacattttgaattgcaccgaaaagactatttatctcaaagaggtttacgtaaaattttgggaaaacgacaaagattgctgtcttatttgtcaaagaaagatagaatacggtataaaaaattaataaatcagtttgatattcgagagtcacaaattcgttaaattgaagagtaattctcaattattcgatttattagatcttgaattttgatgaacttttttttttaagcgattcataaaaaaataaatcgaggaaaaacctatgaatatctcaactacaagaaaggacttcatgatagtcaatatggggcctcaccacccatcaatgcatggtgttcttagacttattgttactctagacggtgaggatgttattgattgtgaacctatattgggttatttacacagaggaatggaaaaaatagcggaaaaccgaacaattatacaatatttgccttatgtaacacgttgggactatttagctactatgttcacagaagcaataactgtaaatggaccagaacagttgggaaatattcaagtacctaaaagagccagttatatccgagtaataatgttggagttaagtcgtatagcttctcacctactatggctaggaccttttatggcagatattggtgcacaaacccccttcttctatattttcagagaaagagaattaatatatgatctatttgaagctgcgacgggtatgagaatgatgcataatttttttcgtatcgggggggtagcgactgatctaccttatggttgggtagataaatgttatgatttctgcgattattttttaacaagaattgttgaatatcaaaaacttattacgcgaaatccgatttttttagaacgggttgagggggtaggtgtagttgatataaaggaagtaataaattggggtttatcaggacccatgcttcgggcttccggaatacaatgggatctccgtaaagtggataattatgaatgttacgaagaatttgattgggaagttcaatggcaaaaagaaggagattccttagctcgttatttagttcgaattggtgaaatgatggaatccataaaaattattcaacaggctttggaaggaattcccggcggaccatatgaaaatttagaaattcgctgctttgatagagaaaaagagccagaatggaatgagtttgagtatcgatttattagtaaaaaaccgtctccgacttttgaattgccaaaacaagaactttatgtaagaattgaagcccccaagggagaattgggaatttttctaataggggatcaaaatggttttccctggagatggaaaattcgtccgccaggttttatcaatttgcaaattcttcctcaattagttaaaagaatgaaattggccgatattatgacaatactaggtagcatagatattattatgggagaagttgatcgttgaaatgataatttatttaacagagatacaagatatccatttttttttcagattggaatcttttaaagagatatatggaattatatgggtatttgcccctattttgattcttatattgggaattacgataagtgtactagcaattgtatggttagaaagggaaatatccgcagggatacaacaacgtattggacctgaatacacaggtccttttggagttcttcaagctctagcagacggaacaaaattacttttcaaagagaatcttattccatctagaggagatattcgtttattcagtataggaccatctatatcagtcatatcgattataataagctattcagtaattccttttggctataactttgttttatctgatctgaatattggtgtttttttatggattgctatttcgagtattgctcccattggacttcttatgtcaggatatgggtcaaataataaatattcctttttgggtggtctacgagcagctgctcaatcgattagttatgaaataccattaactctatgtgtgttatcaatatctctacgtgcgattcgttgagacagaaattttttgatactatttgctatacccctctctttatagtactttgtagtaaagtaggaaaataaattgaatatatatctattgaatttattttttttattatttttcgcattcggattgaagaatttaatcagatagttatatgagtgcaataaaacagcttcttttgaatataatttatagaatactatattacttatagttaatagaaaagatgatgattttaaattgcagtaaaaatattgagtctcattttctatgtataagaattaagtgaaaaaaatgaattaaattataggtagaagttgttgtttttcccaaggttggttgattagtcatcctgtcttgaagcgggcgtaaaagaccaaccctttttaaattaaattttcaatatcatttgtatgaattagcatatatatattaaca

SEQ ID NO: 312 - DNA, 3173 bp, Glycine max
  source 1..3173: mol_type = genomic DNA
gagttctttcgaatttctcgtatcgtttttcgtggattagcatctcgaggtcctttgatgggcataaagaaatcgtcttggtagcaaccgccaaaccaatagaacaagggttagctctgcagctggtccacaagcaaggtaagtaggtccattaccggccggctccggaccgaaaagacctaacggagtaatcccttatctcggatcggagatgctatgctaacggggctggaatcgaagtgggggacctatctaccgcctgtgtctatctcctgtcaagtatgctccccagacatagactacgtacagggtagtactcttggatataatatcaccgcgtgaacgtgaacataacattaagttacgaatgtaactcccgagggatcgaccactattctaatctaaataaagtcaggcggagaactgttgttcattggagcgccggagtgcggaggttgttcccatcatggaagtcagagtgtgggactgagccttccgaatgataaagaaaaaaagtgcttagtttcgttggaaaaaccaacgcaaataaatatcatatttactttatctcgcccaacttctaaggatagatagaaaaggttggagagagtgactttctgaaaatctctcctttctaaagctgcgcaaggcggccccacccctcttttcccccctttaatgaaagaccctcgcccgccccgcttcctattcatttttgggtcgggacccgagggccttttttttctcaagaggtgatttcgagaatcaaccaaccgacaaatccgtagcccaggtgactcacagcctccctctcgcccaaataaaatgggatgaattaaaaaaaagaagctttttgattgattcagggcgcagcgaaaccaaattctttcaaggcaaaaggggggcttacttacaataatggattcttttttttaagtagggccccagaacgaaaaaaaggtgggggaaccagagttgtcacgataggaaagagaaaaaaatgaggaaccaacgattctctcttcttaaagaacctatatcctccacacttaatcaacatttgatagattatccaaccccgagcaatcttagttattggtggggcttcggttcgttagctggtatttgtttagtcattcagatagtgactggcgtttttttagctatgcattacacacctcatgtggatctagctttcaacagcgtagaacacgttatgagagatgttgaggggggctggttgctccgttatatgcatgctaatggggcaagtatgtttctcattgtggttcaccttcatatttttcgtggtctatatcatgcgagttatagcagtcctagggaatttgttcggtgtctcggagttgtaatcttcctattaatgattgtgacagcttttacaggatacgtactaccttggggtcagatgagcttttggggagctacagtaattacaagcttagctagcgccatacctgtagtaggagataccatagtgacttggctttggggtggtttctccgtggacaatgccaccttaaatcgtttttttagtcttcatcatttactcccctttcttttagtaggcgccagtcttcttcatctggccgcattgcatcaatatggatcaaataatccattgggtgtacattcagagatggatcaaatttctttttacccttatttttatgtaaaggatctagtaggttgggtagcttttgctatctttttttccatttggattttttatgctcctaatgttttgggccatcccgacaattatatacctgctaatccgatgcccaccccgcctcatattgtgccggaatggtatttcctaccgatccatgccattcttcgtagtatacctgacaaatcgggaggtgtagccgcaatagcaccagtttttatatgtctgttggctttacctttttttaaaagtatgtacgtgcgtagttcaagttttcgccctattcaccaaggaatattttggttgcttttggcggatcgcttactactaggttggatcggatgtcaacctgtggaggcaccttttgttactattggacaaattcctccttttgttttcttcttgttctttgccataacgcccattccgggacgagttggaagaggaattccgaattcttacacggatgagactgatcagtgaaaaattctgacaccaatcatttacgtattacaccaagaattaattgacaagcgcattagttttatagttggctatgttgatatagcttagaaaagggaaaagagagtgacagaactgaaaaaatgacctaaacacccttaataatccatagggaataaatagggacgttagtcccctctccatgaaacaatacaatccgtttgcctgtcttggttgatttcgcatatctctttcttgttcttcggcaagctgctcttgctcaagtggaatcagttgcagttggcatatataaataagtagaagatcctgtcttcttttatttaggaatttaaagagaggaatccactggccttagctcatctagccgtagctcattgggcagattgctttgaatagcaaaatagtaaagatcagagtcgacattctttcacaaaacccatgaaaaaaaaaacagataacagcactttaaaacagagcaattcaataaatatcaaataatcaacatattccattgcaaaaaaacactatgagcttcatactcgaatccctcaccatccgttaacaatcgcagcttcttcaactggagctattcttgtgacaactgaaggaaattcgagtcaggccttttaagccccggaaagaccactctcttcctttaatacatttgtaaattgcccttgataatgaaaagagcggattcaatagcatcggcgagagagagaattcctattgagttagctttcctggggaagaggatattttcttctaaaaaggctataccacgaccaccaaagccagaagagaagacatcattcaaaaaaaaggtcgaaggacgaagaagagctccaagcaagagagattcttctctaaaagcagctaccaggtgagaataaacaactaccatttaagcagctgacagctacacggattcaccactacttatgacttcttactcctgctcctagacaaactaagaagcaaggaaagaggaactatataa

SEQ ID NO: 313 - DNA, 2660 bp, Glycine max
  source 1..2660: mol_type = genomic DNA
accatcctgcgacgatatgggccgcaatcacaggcaaactaggttgcacgtgtgagggtgctggcaagcgtcgtatattcgcaataggaaactatgtgagaggttgctgaaacccatccaccattggtttgcggaggtcctccgccgcatcccaatggatgatcaaacagcacctctcattcgtttagttcctagtaaaacatgtttaagctatgacctcaagagtgctaccgattggtggcctcttgtgtttctgtttgaaaggcttgcgctattgtttgacaggtcatttgcttcaagtgttgtgaatacaacattagggacgaatgtatttgaggtacccttcgttaagagggctctgtctcaagtgtcctttgtgaccggtcaaccgttaggctattatggttattggcctttgttcgcgttcacccatcatgttttggtgtggtgggctgcggaacaggttagacctgggatcctgttcgacaggtatgctatattaggtgatgatgttctcatcaccgatccacttgtggcggaacagtaccggctaggcttacaacggcttggtgttaagatatccacacacaagtctttgatatcctcaactggtgctgtagagtttgccaaacaatttctggtcaaggatatgagggttaacctctctcctgtgtccatgaaagctttatgtggcttccaccacccccacggatactacttctaatagatttgcctacgctatcatggtcatggatttggagatagaaagctattccaactccgagattgctgactggattttacacataaggagcaaccccagcctactctcctccttctacgctcctctgagggggcctctctgagatatacggtttatgccgccatgctttctttctgttggtcaacaaccaaccacatctctatatagtcaaaacactagtcctacaggcttgacggagttcagtctgtctggagggaatcatttcttctcaatgccatgatactttctgttttgtcgagccctgctttggtctctggtttgatggttgcacgtgctaaaaatccggtacattccgttttgtttcccatcccagtctttcgcgacacttcaggtttacttcttttgttaggtctcgacttctccgctatgatcttcccagtagttcatataggagctatagccgtatcattcctattcgttgttatgatgttccatattcaaatagcggagattcacgaagaagtattgcgctatttaccagtgagtggtattattggactgatcctttggtgggaaatgttcttcattttagataatgaaaccattccattactaccaacccaaagaaatactacctctcttagatatacggtttatgccggaaaggtacgaagttggactaatttggaaacattgggcaatttactttatacctactatttcgtctggtttttggttcctagtctaattttattagttgccatgattggggctatagtacttactatgcataggactactgaggtaaaaagacaggatgttttccgactaaatgctattgattttaggaggactataatgaggaggacgacagaccactcacgatcgactaaaaggaaagtcgcccggagatattggttcaaatccaattcgtgagaagaatccaagtgagataggcctatatgctggaggctctatcatacatcaattataagttcaagacgggcatccccattcgttcccttcccaactatagctgaacttggtaaccaaactctttcccggcaagaagatccaatccttcgggcaagtgagatactaataaagtaaagtataaagggcttttgcaagaatagtcatagggctcattctttcactttaaactgacacaaatttcctatcccggcagctttctcgtaaaatgaaattagggcagaatccgttttacagttaagatgaggagttcatagcccatagccaagggacaagagtagcgacccctaggcagtaatcgaaacgatacgagcgggacaggggagctaatgcgatgcggtcgatagttagttctggaaggcatagtatccggacgagtgttagttcttgacataaaagatagtcttttactttagatgaatattatgagcataccctactttcagcctactgaattcctaggatattttcaacctaaataataatattttttaactattcgaagtgttgtaatcaaaagcttttgatagctcgatatgtatagatatagctagagcgaccacccatgcgagcataataagacgccttggaagggcagggcctaaacttctggctaaagttagccactagaaatcgattccttggctccgggaatagaagacttcaactttactggcataaaagcagattgagtctaagactaaggcgtgcgtaccacttacagcactaagaacaccgactacggatccggatcacttccagggactgaaggaggattactatttttactgacacctccggtaaaggaagaagagcgattgactctactgacaagatgggtggattccctacattagccagccgcttagatactaaaccctactagccaattgcaaccctagctgccaaagacttgcgaatactcatgttattttattttgta

SEQ ID NO: 314 - DNA, 4944 bp, Glycine max
  source 1..4944: mol_type = genomic DNA
ataagcacaacatcctctacaccacccttgttgagctttcaaaggcgttggatttgcataattgtgcagtttggatgccgaacgaggaccgacgagagatgcacttgactcacgagttgaaaaccaactctgccaagaattttcagaattctattccggtgaacgaccctgatgtgttggagataagaaagaccaaaggggtgaagattctggggcccgagtctgctctaggagctgcgagtagtggtggctctgtggagttgggtgctgtggcggctattcgcatgccgttacttcatgtgtcaaatttcaaaggagggacgccggagttggttgagacgtgttatgctatacttgttttggttctgccaagttcaagcactagggtttggacctaccatgagatggagatagttgaagtggttgctgatcaggtggctgttgccctgtctcatgcatctgttcttgaagagtctcagctgatgagacagaagctggaagagcggaaccgagcactgcaacaggctaaaaagaatgcaatgatggccagccaggcacggaagtcgtttcagaaggtgatgagccatggaatgcggaggcctatgcattctgttctggggatgctgtcattgtttcaagaggataatttgaggtctgagcagaagattattggtgatacaatgttgaaagttggacatgtgctctccagtttgattaatgatgtaatggagatttcagaaaatgaaaagggaggcttccggttagagatgaaacctttccttctgcattcaatggtgagggaagctgcttccattgccaagtgcttgtgtgtttatgaaggctttggttttgaaattgatgtccagaagtctttgcctgaaacagttatgggtgatgaggcaaggacttttcaagtaattttacacatgattggctatttattgaacatgaatgacaaagggactctcaattttcgagtttttcttgaaagcgatggtggagacagggatgataaaaatattggaatatggaggtcaagcaatcaaaatgaatatgtacatataaaatttgattttcagattactgagagttctcagtcagatgaagcaatttcaacaatacattatactggtaggaggcagtactacaacaatgaacctaaggggggcctgagcttcagcatgtgcaaaaagttggtacaggtagatgcatcattatctatatctaatttatgtaccatcatctatttgattatagtcagatgtataatttccctgttaactttttagctgtaacttataaaggacacattccccatcctctagtgaatttatgtggtcatccattaactgtataaattgttagcagttagctttagagcttagaattgtattggttaaattaaactaatcatttagtccttattggtgacactcgtttatgaatcagttcctgtatgaaaaaaattgaagttatagtccacttacactcatattacttattggtacacattggcccctacttttactatatttcttaagttttagtccctatgtgcccttatagggactaaaacttaaggtttttgcatacaagaattgattcttaagtgagtgtcacctataaggaccaaatggtttgtttaactcactacattttatgcttaaagaatgatgtttggtttgacaaatttgcttgctgacctgaattttcagaattatccaatgtagaattgtttatgatgttggaaatgggtggtgaaactatcataataagttagattgggtgatattgctgacagatcagatttaataatacttaggaagctttctatttagtcaatgcctcaacaattcttgtgcttggttatgttctaaccaatatgcatattatcatggttgctattgttacaaaacacaattttgctttgaaagtttgcttgcctcttgtcagattctgcttttagctctaatggggggaaataattctggggatatcaagttgaattccagttctaaaacggctattgacatctgctgtttcacttcaatgattttttgtgtctatacaactcttatttttctagagatgaatttgagattcgatgcataaatcttgaacccagaagaaataaaatatcacacaaccttttcaccttctacatgcctcaaaatttttggttatcaccttagcatttggaagttatatatagagcatggtgctcagtagtggaatcattgttccttgcttttcatgtttgcattaagctaaatttggctcatatgttactgaataatagtggcaccctaggatgctcaaaggggatgttctactccaaattgaccacgcactgatctatcacttatgctgccatttttttcattaaaattttatgaattaatatgataacttcaactttagcgaaagtattttttaattttgtttcttccaacaattcattaggaaagtgtaattatgggcaaatctgttaatacaaaatagctgattacttatatttgacacaattttgcatagatttctctccttacgggtttcatctaagagctgacatgctgtttctgtcataatctaactcaagtcatgatgtccttggcttaacatatcgttgcagagaagctattttcccctgtattggaaagatccttttgtgtttacctcacatatatgtaaacatcatttatccttctttgggagcttatcctagataactctgaaaatacggattccagcaggctgacaacacaggcatcacaggaaacatggagattatattagcagaaataaattgcaatgattaccattttatttttatttgtaaaatcatccaattagttatagaattttcctaccataaactagactagaaaaaattctttatttctttcatcagttggattaggcgaccaataagaaagttcatgcattttggggttaagtgggtgaatagctctagcaaatgctgaagtgttttgccgcaaacccaaatttctttctctgaacttgcctatctgctaatttgttcagcaaatgaaccttatgtaatgttttttaattgatcattatatgattgtttttgtaactctgactttacaatgtggaataatatgcagatgatgcaaggtaatatatggatatcaccgaactcccttggtttggtgcatggcatgacacttcttctcaagtttcagataggaccatcacttgaaaaatccatatttgcacctaaagattattcaagctcacagttcagaggccttaaggttgtgttagccgaggacgatggtgtaaacaggaccgtgaccaagaagctacttgagaagcttggttgtcaagtaattgctgtttcatcagggtttgagtgcctgagtgctgtaagtggtgctggtaactcattcagaattatcctgttggatcttcacatgcccgaaatggatggctttgaattggcaaagagaatccggaagttccatagccgtagttggcccttgattatagctcttataacaagtgcagaagaacatgtgagggagaaatgcctacttgcaggaatgaatggattgatccaaaaacctatcgtacttcatcagatagcagatgaacttagaacagtcctacaaagagcaggtgaaaaactgtgagaacagttttaaaagcatgcttcggtttaagaaaatatgatttcattagtaattacaaaaaggtcatgttattttagttctgtttcctattttcaagcattgcgggctatgcttttattattttgtgaacaaattcttgaaaataagaaacaaaataaaataatgtgtcttttataattactaatgaaagagtgactcaattttctgaagttgctcaaaacggcattgtgaacttgggggatttctaacaatatcaaataataaaaaaagtagccttttgtccaaccatatgttatggctttatacgttactacttgcctccatccaactccaaccgagagagacgatattaggagatgaatcaaaatacgggttcatcacttgatcttgagtgtttggaaaattttcgatcaaattagttttggctattgttaatctattattgcaatgtcaatcaagtggccctgcaatgactaatcatttagcaaagttgacttatatttcgcaataatatcaccatgattttgccacataaagtaaactaaataattttaaatcttttttatctttaaaatataccaattaaaatatcatattatataaaaaaatttcttctaatcccaaccttttatcttacaaatttcttctaatctctgaatcttacaaatcgttttataatctgaatttgtcttaaatattcaactatttatcaaagaatctaactatataatatgtgaatttgattgttatggataaaaaaatctcaattatttgaaaataaaataatgatttgatgacaaatttccaactttaaaaatctatgattaattcttaacttaaaaaaatcatttagttaagatcattttgtaaacaaattaaattgaacgaagtcacccagagaatttttatttcttaactttaaaaatctttcacctaatacagaagacgaggttgccgaacccattaattaacaaggaaatattagtattttaaaaaaaaaatcaactacaactaattaagcttaatttttgaacgccgaattatacgcatcagtgtgtcggtgtccaactaatttgatgattcaattccaattaaactcttaagaacgaatccggagggagcgactaaacgaagattgatgcgagtgggggacgaaactctgctacaggtgaagaaaatgaaaaaagattcagaaaatttctaactaaatcaaaacaaagccaatttgatttgtgtgttgtaactgcgtttgttcgatttatgtgtcgtgcgaaagaaatccaaa

SEQ ID NO: 315 - DNA, 7760 bp, Glycine max
  source 1..7760: mol_type = genomic DNA
gttctgctttttttgttttcaaacttttgtttaggaaagtttgtgcagaaaacaggtaagtttgattgtatccaaagccaccaagaaagacccgtgtagccaccaagaaagacccgtgtagccaccaagaaagaccgccctgtcatacattaatagttatgacctattgacaaaacaataaattttgttgaagcatttgccctcaatgacttcgacaattcttaatagttatgacctattgacaaaacaataaatttggaatcatacttaaaacatgaaaattactgcactttttttacaaaggttacatcgagcaaaactatctcaattgaaagttaaaaaaataacttagtgtttgataaaattaactgtttaaataattaaaaaaaataataccataatttatttaaaaaatataacaaaaaaattaataaatatatcaaaaataaaagtgaaaaaaatataaaaaattaaaaattagaaactaaagttttaaaaaaatactaaaaaaatatatttatcaaataaataaataaattgtttagataataaaaataattaaaaattaattaaaatatcttatgaaacttgatcattaaataagactcactgaattaatctaaatatctaattcaaaccaaatgaaataagtctaaaagcaacggtggtttaatatatatctaattcaaaccaaatgaaataagtctaaaagcaacggaggtttaacatataataaagaagaaagatgagatacgtcatgaattgtggtttaatatatacgtgaacatgcatgtgcgcccatgatcagccatcacagacgagacaaaggaattgtttattttacggaaagttgagtcctagtcaattttgcggtggtgtataaattcatagatgaatcacatcacatatattgtatcgagtctagtctctacaatcactccttcctctcatcctctataaagaaagtgcttaatttgtgttgttacttggttcagtttccatggattgggggcttgctatatcttctcatcctaaaccttattcagtcacaactggtacctatgtgtcctactttcttcttcgatatcatgcatccatagcttgggtatttactgactaatgttggtgattgtaggtggaaatctctggcggagtaaacacaccaccaagaatatttactttgcaagtatgtatcacatatactcctgttcctttaattttgaccgttatcattacttcttaaatatctcagtcttttacattcgttcacttgctcacagaaatatatattagtagaaggaatcacttttaaagctgtgagtttttcaataaggaggggtgtttaaaataaaatgatccaaaataaaaataaaaaaacacttaaaaaattaaaaatcaaaccaaactgatttctttttatttatttggataattttttttcctcaaatcgattggtttggtttggtttatagtttttgaaatcgaatcaaatcataacacttatgctaacacttatattattttagtattatgtatgtacaatttaggttttataatattttgtagtgcatgtatcccaagtttatacaatgtatatcactttttttttataatatgttttgttaaagtttgatttgaatgattttttgatgaaaaatggaaccaaaatgagccatgaacacccttatcaataagtacttgcaagacaatgaaaataaaaaagtcaacattttaaaaaataaacttttcaaagaaaaatcatttttttcaaatacaaacaatagtattttcatatctagagttgacaaaatggatgaactgacccaaccgtgtccactagattagacctaatggcctaccaatactctacctggatcatattttttaaagtcgagttagatttaatgaccgtcatgttaattcattttagcccattttatttttttgtctaaatgactagcaaaatgaacggaccaatccaacccaatccatcagatcaagtgtgaaaaatgggttaggtcgagcctacccatactttatgttgatcttatattttaaagttcaattaggtctagaggaccatcagcttgattcatattaactcattttatttttttgtatgaatttatataaattcaaaagaaaaaataaaagttaaaaaacattggaccaaaataagtttgactgaattggaacccatgttttttgagtccaacctagtccaatgggtcaatccaaataggtacaattttatttgggtcaatattttttcagttcaattcaacggactagcttgacaagcttggttcattttatcatctctcttaaaaaataaaaactatatatatatatatatatatataaaagaaaaattagacccatcaagccaaaaagaaattcttaaaaaattgttccatttagctaaaaaaaactagctaattttcttttaattatctatatttttcaaaatacaaaataatgtaataaaaaatagaaaaaaaaatcaaattcaatttatttttcttattaagtgggtaaaataaatacatccaaagttgttagatcttgagtgattaattagagacattttataaagaacatcatacactattaatatatttttctatgtgtaaatgactcttgaaccttactctatttttgaaaactttttttaaatcaacggttttttttatgttttctttaataaaataaaataaaggtgaattctcttattttagtttgtaattgatattttttagttgtgcatggttactattactacatccaatatttggtattttaggttcttggatatcaaaagcttcacgacacaaaagggaaactcaaatagaacataatgttttgaggttccaacaaccaagtttggatcatcattacaaatgcatcagaggagggtctacatatcaagaatgcaatagaaaatttgttgtgaaggcaatctctaaacaacctcttggttttgaagctcatgcttccaatcctaagaacattttggactctgtcaaaaatgtattgtctgctttctactggttttcctatccatacacaatgattggcatagtaagtcaaacttcttttatattactctcataaataatctccaaatgttatagtcaatacttaattcaattcatttgtatcaaacactttttttggataataataacatctttaatgtttaaatgggccatttttatttgtctttggacagacattatgcgcattttcttcatctcttctcgcggtggaaaaattatcagatatatctttatcatttttaattggcgtgttacaggtgagactctaaatgtgttattttcctttaaatagctaattgtaggttatctttaaaattcattaacattgagttttaaaaatgtttcagggtgtgctgcctcaattgtttattgaaatttatctttgtggtgtgaatcaactgtatgaccttgaaatagacaaggtatgagacttactattagaaataaataatctaaatgaataataaattgcttttctttatatcttttgggcttatgtattatttcgttaaaaatatgataaccaaattccatgtggtattttggttgatgaagtctgactaattattatagcccttgatatggtcgaaaaaacatgcaactttttatagcttaacaaacttttggggtggaaaagtaccgtatgatttgtcttatttctaatttatgttacatgttttttgcagataaacaaaccacatcttccaatggcatctggacaattttcctttaaaaccggtgtcattatttctgcagcatttttagctctggtgcctttaagaattttccttttctacaatgttttttttaacatgaacttcgttaacagagtatgaggggacttattgttttatttttatttttcttcagagttttggatttacttggattaccggctcttggccattgatttgtaatcttgtagtaatcgcttcatcgtggacggcttattcaatcgatgtgagtttttttcatttgcatatagacttttttttttcctttacaatagttaagacgtgagtataagactgttaatagtatatccataatagtagctagattaggaagatgaattaaaaaataagttttttttttaaataaaaattatagtgaactcttatggatcaaaatcaatccaagataatttttttcatatttgatttttaaatttaataaaaagttttaaaataacttcttatatattaatttatgacttcttcaaaatagtttattttttataaaaaaatatttttaaaaactatattacaaaataagataggttgagaattaaattatttcctagaagttgattctcaagagcaaacatttttaaaatatcctccaaaagagtgaaaattcaaatcctttagttaaaatttgtcttctaaaatgctttatattttcaaacatccttgatttgaaatccaaagtatatattttatgccaaaacatttaaaatccatttgaaaaaatacattccctcattaaaattcatctcaagtacaaattaagctattgaacgaagatatttctaacaaacacgctaatagaaactaatgtcaaaatatttcatttaagggtgtttcgatgttttgaaaattttcaggtgcccctactgagatggaagagatacccatttgtcgcagcaatgtgcatgatttctacttgggctcttgcattgccaatttcatatttccatcacatgcaggttgttctatagctaattaattgtgttttttataaacgtaagttatggacgagcatgaattaacttatatgcacataacaataatatcaaatttttatcccaggttgttagggttggttttgttgagttcatgattatttattagaacttaattaattatgagatgtgaataagaaagttgaagaaaaactagatatgtaaagaaaaaaataagcctcattttaattgctttagtataatatgtacatttatattgaaagctaactttgtcaactatggctatctcacttgaataataaatagcctgaaactaactaattatcaataagctacaaacttttatatatataagttacaagctaccacctaagatcttcttccatgttattaatatattatcgccatgtagtcctagaagttttatattctcttagtaccttccacatgtaagaaagatgaaaggaagctaggtattttttttattgctaacacatgtaacgttgtccagaccgttgtgttgaagaggccaattggctttccaagatcattgggttttcttgttgcattcatgaccttctactccttgggtttggcattgtccaaggtaaaagctagcctatagtttcgcaaaacacacctttcttctttccaccatcaaagttttccattcaacatgtatatataatgtaaaaccttttattggatttatataggatatacctgacgttgaaggagataaagagcacggcattgattcttttgcagtacgtctaggtcagaaacgggtatgtttttcaaatcaaacatctcagcaaaattggttgtggcatattgtatatcccttagttgttattaactattttttttccaggcattttggatttgcgtttccttttttgaaatggctttcggagttggtatcctggccggagcatcatgctcacacttttggactaaaattttcacggtaatatgttgtttattatatgtatagttacaattataggtgtgctgtgtcttttttccctttaagaagttatttgttttgaacaacatggtgtgattttgattagcaagtgttagaatatattacaaaattcttataattttttagttgtaacttaagtaatttatagtgacttatattatctcttaggattgattttctgaccttagtaattaggattatgggtctattattaattatcaatataatatatattagtgtttttatcttcggtgatacatttttcacatcaatattgatataattttattatcataagtattccgttttaaaaaaatgatcttatcagtagtcaaattaaagggtaaaaaatgatctttaaataaagcgtacattttacatatggatatatgaggatataaacttgtgtaaacttttcaacaaaggttgaaacttatgtggtgccactgttttagggtatgggaaatgctgttcttgcttcaattctctggtaccaagccaagtccgtagatttgagcgacaaagcttccactggatctttctatatgttcatctggaaggtaatactcttaaagattgtttgtcatctaaggaggttaatatcaagatttatatttaagagaaatagctatccaaatactctttctcttttaagaaataaagttgtgtgacgatttctattgtcttcagacttctaattgagttgcaaaacacaggagtaaattagctaaattaaagttgttttttgtgaacatgaatttctgtgattgagattatgcacttaatcatatttcgatgtgatttcattttcttgtgaaaagtgcaaaacatattgagacattaattattgcctgcttatttgtatattatttgttttcaaattatttgcactaaattctttgtctttgttgatacaaagttgaatataataattatgtattgatttattgtgtctttttgcagctattgtatgcagggttctttctcatggcattaattagatgaggatatcgtggaaggcttaaacaatgttctcgacacatacaccaaaataaaaggaatatatgttttgcatctaagatttattaaataaagccgaatgttggttcttgtatcattaagattttttttttaattgtcgaagactttatgtattcatattcaccttgacttctacggtcaaatttttcataagtggaataaaagcaacttgttatacaagttttttttttttttgaatttagtgctttaagaaagaaaataataatagtaaaaatgtttctttttagtgcacggtgccctttaatgcaaaactttcaaatttaaagttaaaacattattgtcaaataagaatcactaagcatatttcccacaaaattaaattttcatttcattttatattatctgaatatattaccaacacttgcttttcaagtttgaaaattttatattatcactttttggtgccaatttgatataattctttttttgctaactcaattcatatctcccataatgttattttttaatagtatattaatattattattttataaatatttatgtagaatatagatatattaatattattactagtaaatattattataatcccacaagaagaattgcaattttaagaaaattaataaaaaatattataacaatttttaatcgttattatattaaattaatttttaaaaatataaaacactaaaaactttaatattaaagtgactaaaggaatattttgagccaattcacaaatataaaagaattagaatgaaaaattttaaacataaaaactaaaataaaaaaagcaaaaaaaaaaaaaaacagaaggccaaaaaaacatgtcaagatattagttcccaacaaactaaattctcaatggcgtaaagccataggaaaaatattaatttgttaaaattcattttttataattatggtataaaaaattattatcatgattttattatatatatatatatgtacatatgtgtgtgtg

SEQ ID NO: 316 - DNA, 11758 bp, Glycine max
  source 1..11758: mol_type = genomic DNA
tttgtacaggcaacttattaaaactaaactccttttataataaataattatttatattctacttagtgtttatagttattaaaataaaaaaaaattattcgtggaggtctaggaaatccgaattagtgatgttgaattacctaatataatgaccttaactaaatccataaataaaacaaatatatatacttttaaccatttcattttttgtggctaaatgtgactatcatccataagttggaatagaattatacaaaaaaatatatatacactttgaaaaactatattatattaaaaatttaaattaggaaaatgcaagcagacacgaaaactggttaagaaaataaaatagaaaactttattaaaattatacaaaaaaaaaatcctttctgtttcagataattcttgattttagtaaataaaaaagaacaaatagtaaccaataatcttaaaatattattaaaaaatgtgttgttaatacacccttaacataattttgaatatattcttccgcgttggttcatgagtccagatagcgtgaacgcgaaacacgcgttgcacgtgctacgttgcgtaagcatgctcatgctgttccccactttaatattgctaaaatttacagcaaattaaagtatgtacgtagatattcaattaaaattgagcaaatcaataatgtattccacatttccgctactaaatgctactccgtatcacatcaaggagcaaactatttaatgttttattttttataactctcaatgctataactaaaattatgtttgcttggagtataattttcgtggaaaatgctaaaaaattgtcaatgaaatggttataggtcttttaacataattattgtagataattgttgtaacagatagtaaacttattatatatcataatttatgattaaatgataatataatttttttatatataaatcatttactctttaaaattttcaatcaaaaataaaaatcggagtgagatgatgcagaccatgcatattggaactcctacacgcacgtccccaacttctgagtcaccaattcttaaaatggacgatgcccacaaggccacaacgttcatgacattaatgaggatcgatatggcatctcaccattttgataattttttttttgtatttttttacttttttatggtacattttttataggtacagtatattattttacatattattaatatttttttagtactatcatttaaatatataattttgaacttttttttttcatttctatgatatatgattgctaataggttcatcacagatcaatatcattcttttgcgtttgtattattaatgtcttattagaagaaaaggacatatttataaaatggtatattttcatttcaaagatatcattgtgtttgtactattaatgttttattacaagaaaaagacgtgtttaaatggtatattatcatttcaaatatttctttttcaacatgaagtcatattttacacagaaattcatcatatattttacactttgaataatggccgttcagaaaattgaatagcgacaaattttagtatatgttaaatccttggtcaattttgaaacgttaattgaaagcataatacacaatttttcgcttccatttacggcatctaaacaaactacatttttcagaataatgctcagttctataaaacgataaaatgcatacacactaatgcaactgttttgtgggaaataacttttcatcttcaactatttttctatggtttgtactgttaaaatttggtgattgagcagcttaaaaagcacttcgtaatccaatttccaacaagcagtatgccactatgttatacacacacacacaaaaacaaaaaaaaaactacgttgaaattaactttagctacagattaaagagagcagacgacagacaaaatagaactaattttatatattaatctcgaccacttggttgttgagtagattttttatttttttttatctgattgagtagataatctcgtatatcattgttttgatttttgaaaacgattcactctgtctctgttgaatgtattgataagtcctgtggttaattaggatgcttggtattgttgtgtaagtagagtaagtgtaaaggaaaagaaaggtcgaagtctgagtattagtattacgaaatgtgtatttgtcatgcaatttctgcaaatataatgcagcttaggtttaggatcatacggggaacagaaaaaaggggtgacaataattgatgtacttgtataaaacaaacatcttcttgatttgatttattcattatgtttttatgctcaatgaatctctagggatatgtgtaaacaaagtcacattcttcctatgtgacgtgattttttttaagaagcctttaaagtgtacttttaatctgcattattattcggccaccctgtgaactgcactgactttaattaataacagtgaattttaactaatgcagtaaaataaaaataaaaacacgtattatattagattatttttacatcatctagtatcgtataaaattatttgttctaaagaaaaagagtaaagaactcttttattcctcaatatataaataattcgcaatctaatatatgaaaaataaaaaattctgatttaattctttaatgtctaaaatgtgcgataataccttttgtcatatgttaatatcaaattgatttatgaaatttagaatttaacttcaaattgattatttaacattataatttaatattaaaataatcttataaaacttaataactaatatgaaactgttctaatttttgtatatttaagaactaattcaatatttttcatgttttaaagactaaattaccaataatttatgaatccggagatcaaaatggtcattaactttaaaaagtattccctaccttttgttataaagacaccttggattagcttaaaagaagtaataataagtcaatatgatactaataaataaaagcaaataaaaataaaaataaacatcaatataaaagataaggtattattatattttatatcttttggcatgctttattatatgtaatatgtttagtaattgaagatcttgattttctttagtaaatattacaaattaaaattggtttatttttacttgtgaaattgtaatatataattgatcatgaaaaaatattggtcttgatagaaaaaaaaacatgagacaaagtttacgcttaatttttgtttatagaaataacgaacactagaagtgaaaattgttatctttagaattcaatagacaattgtttggttttgtggtgaactttcaaaaagcgtgtaaaatatgtcttgttattgttactaacaatactaacaccaataatatttactcttaattccttaacaaaatgtcttgtttcatttcaaagacaataaaaaaaaacattcatatttctcgtgagcatcgaaagaacactttttttccaaaacgattgataatcaagaagtccaaagcatttcatattatttagaaatttagttgtttactaattagattgaatatcaatatctttatcaacttaatttccatattgaatcagaattgagatatactttctcatcaccaggaaataatgatatatatgacatacttgttaattgaacttaatactctcaatataggagtcaaatattgctttaacctaaaagtaatcaatattagcggtgtttttatcaaatttggattagtaaactttactaaatcctcaattgaactttctcacttctgaaccaacaaactttcggaaatgttaatatcagcttcaccatcctcgtagttcctaatttttcatcacccaaaactagaatccaattagcaaactctttaacctttgttttatattcaaagttacaaccactataaaatcacgtattttgtactgagttaaacactttgtaatatatttccataatttagaagagttaataattgtcaatagaattttcactttgtttacatttggaatacctagcaagatatatttaaaaattataatcatcaaaaatcatataattatattcttttaatttcagctaatttattgaatattttaagatgaataaatttaattctaacctagtataagtacatagtcttaagtttaggatcataatataagcaagcaagtggacaagttataatttagttttaactatagttttggttttctaatttggattatttattttctcattcttttggattatttacaattttagtttcctaaagttttaaaagctaattaggcctcttatttttaaaattgaacacaaaatttatttattgattttcttctaaaaaagaaccatattaattttctttataattttttaaccaattttttttgggttcataatgaacttgatacataaaataaaagactccggattaattgacactaaatatctcacttataccacttaatacttttatgtaaaatacaaaattaaataatctcattattagattaatttttataatttttttataaaatatattaaatttataaaaaaatcatgttaattaattcatcgtaataattaaaacaagtgacaataaatattatagaatttttttaaaaaaatgctatattgaaaattttaaattaaaaaaaatatatggtaagtatgttgaaagttgaaacctgacacgtgtttggcacattccctgtgccatgtaagttggagaggggacagacaggtaattccacaacagtatctgccaccttacttcgtcacctgtctttcggaacctgaaatcacgaaaccaccctccacactttctcaaaataccaaatacgccccttcggtataataagaatcccatatccgtatctcacaagcgaatgcgaaggagagagagagaagagccaccctttcttacaataaacaacaactcattctttcaaggcttcaacaagagaaactttcatagtttttcactccttctcccagtgtcggtgtgctcttcttctggggcattcgttttttgcttcttcagctccaacttcacacgcgcttttggtggaagaagcttcactgggatcactatggtgggtgtgtgagagagggattacggattagtgagtttttgtcactaagttagagctatgtcgtttcatgattgatgggtggtagcagtttggtgttgggattaaaggtggggctttatttggattctgtgtttgttgaaggagctggggtaggtggggcgaatgtgcttgagttttttttttaaaccaaaattgaaacttacctttctatgagtttcttctgtttcgtattggtggcttaatttggagtagctgttgcctcagaatgcagcaagatcagagaaaaaaggtgaatttgttgtttgttctcctcatttccaagcattactctaattaattgctatacaaaaataattactttttcaagcttttctctgtgctgaatgaataaggaaggtgcccttttttggtactaagctgagtttaaccgaatgaattataaaaataaaatcttgtcttgtttagtgttggtgggttactacttgctaccgagaattttagattacataagtcacagtgtgggagtgaggttctgctaagttgttggttccatggggctgtgttatgatgttagttagctctctcctaatgtttaatccatcacatgacaccatttatttcccccacgtgacatttggttgacaagatctttattattttcaccatttttttgggggggtctaatgtgttgatgaaatttgcatgatgcttctttgaactggttagatggcattcctagggttgatcttccatcccaatcaacccacccttttgcttttctttgtttctacgtattctgaaatgtgtcttgcacgctttaggtgcgttgtacgagattgactctccgaaataaacgttggtgaatgacaagaaatgatgatttggcaaagaaaaaaaaaatcgtcttaaaatgaatattggtttgccataagaattgtgatgtgttgagtggttttaagtgctgtatttcccccttcttttggctttgttaagctggggagtgaaacgttgtatggtgacaatgtgtttctttatgtttatttttgttatttttcttgtgttagtccaatctatgcagacatgatcagattactgcaaatctaatttctactctctttctttgagtctatgattcttcaatactgagtttcataatgtaaattctattgcacacacaaattttgtgttatgtgtattaagcttatgatgggtcatggattccgagatataaattaatttcccttgtaacacagcaaagaaagattatttattattttaatttctatttatcaattatgaaaatttgtttcccaattggtgctttagcttgatttattaacatttctagattatcaaatttgggcttgcctgattttcctttgcggattactttaatatctttgttacagggctcaatggagatggaatttttctccgattatggcgatgtcagcaggtacaaaattcaagaggtcattggaaaaggaagctatggtgttgtttgttcagctattgacactcatactggcgaaaaagtagcaattaaaaagattcatgatatctttgagcatgtatctgatgctgcgcgtattctgcgtgagataaagttgcttagacttcttcgacatcctgatattgttgaaattaagcatgttatgctgcctccttctaggagggactttaaagatatttatgttgtttttgagctcatggagtctgatctgcatcaagtcattaaagccaatgatgacctaacaaaagagcactatcaattttttctttaccagttacttcgagcattgaagtatattcacactggtattcttcaatatttgatagttacttgttcatgaatatcttcttttaatgtgcattgtgttgttagtgactatagcttgttttctctctacaatgaaatgtaattgaaattgtgtcattccttagcttttttcttacaaagatgtcaggatcatctatatttttttctctaactattgctgttgttgacttttttttgcacctcattcctggatctccttaaacttgtatagtacttttatggttttgccaaaatgtttttcttattcatttgtcctttttatattttactttgtctatttatcaacataaggttgctggcatcaatgtcaatattgctcaccaattacatttcaacacattgcagcaaatgtctatcatcgagacttgaagccaaagaatatactagccaatgcaaactgtaaacttaaaatatgtgattttgggttagctagagttgctttcaatgacacaccaacaactgtgttttggacggtattccatcccaacattttctctgtttgttttgtaccttttcaacagctttgctagattttttgctccctcatataaaagatattggtaacataggggctgatgttttcttgcttacttaaatacatttctataggattatgttgctacaaggtggtatagagcaccagaactctgtggatcattttactcaagggtatggctttttcaagattttcagatatcatataagtggtagagaacctaattatgcatagtcttgactcacaccatacctaattcatgctcattagttttgtgtgtagaaattgcatatcaacccatgatacatgctttctgttatcttctttctcatcaataactaaaagtaagacccaagaccaatctgttatttattcttaatccactggttttctgtttctattagttttattttgtgtctgctgatgagctaacggtaaggtactgactgcagtatactccagcaattgacatttggagtataggttgcatctttgctgaagtattaataggaaagcctcttttccctgggaaaaacgttgtccatcagttggatctgatgacagatttgcttggcactccctcgctggatactatatccaaggtagtttctttttttctctttagagggaaaactgcttgtattttcttaactaagtttcactaacatcattgtttggctggtttacaattttgaatctgtgttggatgcaggtacgcaatgataaggcacggagatacctaactagtatgaggaaaaagcagcctataccatttgcacaaaaatttcctaatgcagaccctttagcactacgactactggaaaggttgctcgcctttgatccaaaagatcggcctactgctgaagaggtttttatattgttctctatttcttacgtgtgtgtgtgtgtgttgaaaaatcattctactcagataattaactgcttcttgagcttatgctttttctttggagtttggagaatacaacaacaacaacgcctgatcccactaggtggggtcggctagtttggagaatagaaatgtataattgatgtgcaacaatatgtgacttccttgctttagaattctgaaggatttgacattttcaggcattagctgatccttacttcaagggactttcaaagattgagagggaaccttcctgccagcctattacaaaaatggagtttgaattcgaaaggagaagagtcacaaaggaagaaattggagagttaattttccgtgagattctagagtaccatcctcaattattgaaagactacataaatggaacagagagaactaattttctttatccaaggtttttatttttggtttattgatttatacttcaactgtttatcttcttttccttaatatttttaattcatatgttctactctattattctctccttaccctttattggtgcatattcttcacagtgctgttgatcagttcaaacagcagttttctcatctcgaggaaaatggtggtaaaagttatccaattatgccacttgaaagaaagcatgcatcacttccaaggtaattcactaatgtagtagtatctcattggtttcacttgtcattggttgtaatcataggttgttaacaataggttactttgattgtattatatttaagatatctcttcattagatataaccagttttttaaaacaataaccggttatgtcaaatcataacaggttgtacaaatttggttttggttatggttatgataacaacttgtagtctggttatttagtagttatggttatggttacttgaataaccaaatcatgaacagcgttagacataactcaatcccacaaaactcacttgtaaggtgaggattatccaaactttataacctccatttacatcatatctctagttgatactaaatacaccccttcaaagctgcaattaaggcaggtcaaggatgaccgcaattaagatgactttccaacagtttttacatagcgtaatacagtatcaaagtggtgtttacaccttgtagttaaatgttgagatcttacattgactagagacatggattagtagtgaagtctaagggttgtatatacccttcacttcaaacccgctgttgatatttatttgagccatgttttatattgctgctaattactttctatgtgccctttttcttaattcatttccccactatcctatttatctgctctttgaatgtctcagcatggcatgagatgaaatcgaccaaaataatccacatcttctcctggctgcatttgctgttacaactgtttcattcatagggagcctaatcagattacatcacactgaacttttgtttgtttgctttcctcttttttggaatcattgacaggtcaacaatggtacattcaaatatggtaccctcgaaagagcaatcaaacattgcttcctgcataaaccggcagacaactggggaatttaataataattccagggatacagaaagtcctgcgccaaggtctattccgggtctgcaaaaattttcacaaggtatgtgattgttatcaattatcatcatgcctttgtttagtttgtatgcattattagtaatcaataagctaacattcttgtattcagcaaaacctggaaaagttgttgggccagtgattccatacgaatatgcaagtgttgtcaagggtacatatgatccaaggacatttatgagaggttctgttcttccttctcaacctatcctccctacgaatcattatcaacgatcaacctctggaaaacaagaaaggtcagcaacagaagctgacaagggtgtatctttacaatcaaaacttgctcagcaatgtggtgtgaatgccaaaatagcaccagacacagctatcaatattgacaccaacccttttttcatgacacgagcaggagtgaacaagatagagcaggatgaccgaatagccattgagacaaagttgctgcagtcaaaggctcatcaatatggtgggattagtaccactgctcatagaaaggttggacctgttcagtatggcatgacaaggttgttctagaagaatgttgtcttgtgaatagtttggccaggtggagcaatccttgtggagaataagaaaaggttcttcatagtggagaagtagcagtctctggtggtgctttgtgtaagacgatgatgatgacatgagttagtgcttccccagaaagagccagctttctctgggcaaaccttgtaaacattggtttcagttatcaataaactgtacaaccgaatttgagtcctatcttgtaattcaatccacacattcctttgctcaagataatttttttttttaaaaaaattttcctgcaataactattttccaagtagaaataaataaatcagactggtacgtgtactactgtacgagtaaaaatgtggataatgtaaagtgtttttatgcgggttatacacaccggatacaaaggagtttcattgtttaaccatagtgtttttaaccacctttggccattataaaaacagattcctcacgagtttctttaacaactggattccatttaaaattttatcaaatggttcaaatgctaccaaattttcctcacctaggcacagtaacaatttatccttgaaagtaggtttggtgcttgcataatttccttctatttaggttttttattttgaaagaagaaaaatacctcattgttttattggaatcaaaccccaaacaaatagtttgagcattggaccgaatacgacatcacagtattcatatgattttaaaaatttgaacggacatgtgcccaccttcacccctcatggagccacattggccttccatgtggaggaagttactgtagctaccttttggaagctctatctaatagctagctatactggataagattaacttttatgtggaggctagcttttagaatgtacaaccacttgtaagttgtaactcttgttttttcctacttcttactttagaatagttaaaatgctaatggtggaaagtgtgatgcaaagagacttgtttaggttgttactaacctatcagaaaacctggtggaacactcttataatgttgcattgcaatttgcagcccgtataatagaattgaagaaaaaaaaagaaaaaaaagagccacaagattggctctaaaatgtactgtaacattgtttgttgatttacattgatcattaatttaaggtcatacattaaaaacattaaaaagaatgacctagaaaatgaggtaaatccgaaattgagacaatgcatttgaatgatctggtcgcttgtttattgtttggcatttactgcatatgcaagctgc

SEQ ID NO: 317 - DNA, 3507 bp, Glycine max
  source 1..3507: mol_type = genomic DNA
atattttatcccattttccttcctttgttctttgctcattttttatttatttattaaagtgtcctctaaacatctcttatagttcacgttacttgagccactgagcattcttcttaaaaaaataccatggtttggactcctcacctaacaaacgtggtatttatttgacttgttccttttattaatttattggtatatgttaacttataattgttatacaaacaatactattttctttacaacatcctaacaacaggaaataaaaagaaaacaaaatgaggtggttattttgtcattagaaataaatttattctaattgaaaattaaaagagaaatataggaagtactagctatgttttcaaaatatgattttgtgtaaacaaaattaataattttggaaaaataatttcaaagtttggcttttgagtccaactttttatactatgttcgagacactgttttttgtttgctaatttgcttaaagttacatccaactgttgtgatctgttagttcttatgggctatagcttgataaattgaaatgaactatagttattagtattttctaattaaagaatgttttgaaatatcagttgaagtgtaattatataatctattaaatattttaattcttttaaaaaatatatattgaacaaatttatatattatataaaataaacttctaagtattttgaaataaaattcactttaaatttattgatatactcttaagttttttgtatatatacacctatatccttgcataaatagtttttgttaactgaaaaaataataattattattttttttaaattgaaaataaaaatcaccatttaattaaaattttaaaataactgtaaataaaaatagaaaccttcttcaaaaataacatcaaaaaagagatggaggtaatattattatttatcttttttgcttcattttttattaacttcattgtttgtttgtttgtatatcctcgaaaatgatgagtgaagcggctggtgaaccctaattagttgtcggtgtttgttggaagagctcatctctgttttcttcgtcatcttccccaaccagagatgcgccccacaacagatacttactaaagctttcaactttccaacaccctttcaggtttcttacctctttcaccctcttttcgttcttcttcacatctctacttgatttcaaagaaagagtttttgttttagttaattttatctctcttgtaattcacccatctaattttttttttatagtttttgttattcccaattgtaatggtactatggagggcaactaatcactggcttgcatttgcattagatattgttttaaaaaatttcataatgtttatactggtgagtgtagagttgggttagtagaaagtagaaacatttcttgaggggtggcaagattgacatgttatggaaggggctgttgaattattaacatgataaatgtggttctgtgtttcactctcactgtagctaggctaacaaattgggttatagtgagtgaccttttgaattgattgtgtacttgtttgtgttcacattgggttatcaagaagcaggttgaaatatcaggtaaatgtccacatgttttgttccacttagaggaattgattttgagttaaaacaactttaggtagtttttgcattgggtaacaaaattatactgagttttactactaacttgcatttagaataaacacttctagacataaattgcatcacttcaaaatcaattttaatcaaaattaatttggtaaatactcacccaaaagcttgagggcttgttttcttggcaggtgtatgattaagtgttgttatgttgtaatgttaacattgtaaattttgttggtaattacatagttcaacttgaattgcacgcagatgttagccaaggcccataacaaaggggatggatctaagtccctggctaagatactggcaaaatggaaagaatataatgcccagattgattccagcagtgatgcagataagccaattcgcaaagttcctgccaaaggatcgaagaaggggtgcatgaaaggtaaaggggggccagagaactcacggtgtaactaccgaggtgtcaggcaaaggacttggggaaagtgggttgctgaaattcgagagccaaacagaggcaataggctttggctaggtactttccccactgccattggagctgcccttgcatatgatgaagcggccagggcaatgtacggttcctgtgcccgtctcaactttcccaatgtttcagtttccagtttctctgaggaatcttccaaagattctccgtctgcgaatcattgtggttcctcaatggcagtgtctgcaaacgagtccatgatttcacctagtaactctggggtagatgcagaagaggatgttgatatggagcccatttccttatccttaagtgtaaagcatgagaatggggaaggtgaatcggggataagttcatcccctccttcttcctcatgatgtacattgggacatggctaaattttttagcacatgtacttgttaatggttagcttagatttgatcacatttggtcctggagattagctgttgtaaaactaaaatgaactccgttgcaaaaatggtcaattcttttggccgcctaatttgcatggatatctgtctatttttaactcgttagggtgtgaatcatacttacctttgtcatgttacatgctctcttccctcacctctacatctccaaacccatttgttattgtctctatcttgcccggtttattttactgtgagaatgtggttttcttaattttaagagcttacatttctcatgtaagtttctatttacataacacttgacttgccatgcatgattgggttataggggatggaagcttttggaaataggaatagtctataggaaatctccatgggtctctagaggaacaaattaggaagtatttcagcacgtttggaaccgcgatgtgaactcatggtaactttaaagctagcctctggtgtggtgtagtaactttctgtaatcatgttaattatcatcttttcaattatgtcatttttctatttaattcttaacttatatagttatcatgaatgagaaatgattaataatgaaagttatagtatttagaagttaagaatatttttaataaattatattaattatgtttgttagtttaggtattattttttactatactatattattcttttgcttgtgatttgtgtgtatcaaatccattcgtcatgaattgattgtataaaattatgaatgattttgaacttgtatgaaatataaaaaataaaattaggtataatatgttgttttttacattatttttaaataaaaacaatgacaatatttaaaatattgcatcctcaaatattaaaaaattgaaaacattcattgccaagtttcacattgaaattagctctggctgagttccagtcttacacgcacccgtatttccaatcaaaaagagttctaagggaattgaat

SEQ ID NO: 318 - DNA, 3185 bp, Glycine max
  source 1..3185: mol_type = genomic DNA
acaaactgttataccaaactgagaattttacaatttccaaagatgcaattctcaaccattaaccaatttcatcttaaacactaacagttcttcagtcttgaactttccatgctgaaaatttgttgcctatttcttttataggcagtggcttcttatgagagtcacactctctgaacttcttacgtaatacttgacttttcattttgtgctttataattgttatctcatgcattgcacttttaagataaggttgttgtgcattgtttggttgagtgcaacgatttactgattaccatagctacttgtggatcttatattttcaaaagtgtatgcttggtcattaatcaaccaagcatgataagccccatcatctaccaccccttctataccatatacgcattttgcttatctacattgctactgttacactcaaacaagtctaacagataatacgttaagttaatgaacatttttagtaatattattataaggattggccaatgtaattgtgaagagagaagcatgctttaagctacccaacaaaatggataagagtttcagttgatatggttctcttgtttcttttccaataaaaaaccaactttaaaatataaaatttactgtaacaaaggaacaaagagttttcacttaatccatgaatgagaaaggatggtcacaaaatatgttaggttaatatggaatgagggcactgtgcaaactacacaaataatatcaattccaccaccatcacacatttacgttcttccaaggaagagataagataatggagcctccacgtgtcacctccacatggtacctaacaataaggctaccattcaaaattttcctcactcgtgtggcctatatgctgtaatgtcatcacttattcaatccaacggttgtaacttttcggcaaccaatcctctccatttcacaccattggattagtactacacaaatcacactattatatatagcaagtttgagcagaagcttggatatctggcagcagaaaaacaagtagttgagaactaagaagaaggaaatggcttcctcaatgatctcctccccagctgttaccaccgtcaaccgtgccggtgccggcatggttgctccattcaccggcctcaaatccatggctggcttccccacgaggaagaccaacaatgacattacctccattgctagcaacggtggaagagtacaatgcatgcaggtaagacaactccacacatatatacacacaagaggcaccaaaaagtttaaaattcatcttacacatttatatatgctccaaaatgttacttaatttaacatgttagtcataggttacttaaattaacatgttagtcataggaaaatgtgcacatgtgcatgtttgttaactaacttttcatgcaaattactaggtgtggccaccaattggcaagaagaagttcgagactctttcctacttgccagacctcgatgatgcccaattggcaaaggaagtcgaataccttctaaggaaaggatggattccttgcttggaattcgagttggaggtcaatttcttgcaaccccttttggtttaattatagtttcttagtcttagtttgtttcaacttattttgaagaaataatcgcttctcttgctggcgtgctaaaagtacttttggaaacaaaaaaaaaaaaaaaaaaaagagaagtggttgttttccaaaatttaagtttatctaatggatttttctatctcagacttatcaatattgatcaaatctgtccctattattacaaaacaagcacttggttttgagttttgatggttgatatgtttgttgtgtttgtatatagcacggtttcgtgtaccgtgagcacaacaggtcacctggatactatgatggacgctactggaccatgtggaagctgcctatgtttggctgcactgatgcttctcaggtgttgaaggagcttcaagaggctaagactgcataccccaatggcttcatccgtatcattggatttgacaacgttcgccaagtgcagtgcatcagcttcatcgcctacaagcccccaggcttctaagtcattgaaaaatttgcaaagcatctgtagccaccccactttgtttgttgtacttaaactacattcccatttgtttttgctttatgagatttcatcatcctgtatttttggtttctgttttcggacttcaatggaaattaatggatgagaactaatgaataagctattgtgttgtgttgctttgtttccaaataacttcaagaacccattgtccttgcatttccatcttgtgggttgaaattagtctcttctaaatttaagttaattgtgtcactaaatgatggttaacaaaggaattctttctgcgttattcaaagtacacagcatagtttagttgagcttggccttactttgtcacaaatctgatgtatgaatgttctttatactctggttttccaagaaatgaagttcaagagatagtttgtaaacatgttgctactgaactttcaaaaccaaacatgagccccataattcttggaaacacagatattttgtatggtatatagcaacaaaatctactaaggaactgctaccaaaccgttttgttatttatgtgcaaagaaagcgatatcaaattcaaatttttgttggtttcagaaacttttctttccaagcaataaccatcaactgcaactaaaccgttttgtttgttccatttctcatctcctcactgcaattttcaaattatgatttggataacacataaaaacacaatcagatttggtcatgctctggttctaccaaatacttttttttttctagaattgcctgaatctgatccttagctgacaattaatctcaagatgattctattgtttgtaacttgatagttatggattagcaactgatagataaatcatggttctaagttgtgagtagttataggtaacttatctcgacaccgttgttagtaggttgcattaatatttagattggaccctttcgatataacaatgatacaataagataaagaaatagataagtttcacctcctttactcccatgaccacatcatgacatattcaaagtcaatggtgaatacacaaatcaaaggattttttttccaaatatttatttgtggatgtgaatatactcatcctagaagcaagtttctttaaata

SEQ ID NO: 319 - DNA, 28230 bp, Glycine max
  source 1..28230: mol_type = genomic DNA
ggaagcataaaaaaaatatacgacatggttaggaatttttttttagtatgtctgacataattttttaaatgttttggcttcatatgaatttaacagtgcgtcatatgaacttacacactcattatattttttaaccttttaaatgattttaaaaaaaatatgacagatgcaatcttattttcactttttatactttcactactgcttcatatgacctaaagtcagagaaatattttaaaaagataaatacgataaagaatacgatgagaaagaaacctcacacaatgaatagaccaaattagacctatttattttccttagaaataaagaaaataattattttttattttttcacattacatttatatttttctatcactttctctatttaggtattgattggcatatgagtgtacatgaatttttttttttaaaaaaagcgtaaatattaattatattcatgcattatttgttttctgtctttcattttctatttaatcttacgttatcaataatttattattaaattttatagttgatgatgaatatataagagatataaataaaaaaaataattaattttataataaaaattaaaaaataattattttgagataaaaaattttaagagaacaattataaacggagagtattatatttagttttatgtaccgtgtacgtgtctactaacatggtgtctctccatcattttcgtaggaaaaaacattataggagtatgaaaaaagcaaaagttttgtctgtttatggttttgtatatacccagctctacttggcagcaattacccgtcttgcttgctacttacgagacacgtacattaacacttgtcctagctagtgcatgcaattgccaccccattcatcactcctcccttttccttctctttatatttatatatatatatatatatatatatatatatatatatatatatatatatataaacaagcacaatgcatcatctcaaagaaattaagagagttttttttgttcctcactgaccaagccatggcgatgagaaccaaactttctttagctatctttttcttttttcttttagccttattttcaaacctagcctttggcaaatgtaaagaaaccgaggtagaagaagaagaccctgagctcgtaacatgcaaacaccaatgccaacagccacagcaatacactgagggtgacaagcgggtatgcttgcaaagatgtgacaggtatcatcgtatgaagcaagagcgagagaaacaaatccaagaggaaactcgtgagaagaaagaggaggaaagccgtgaaagggaagaagaacaacaagagcagcatgaggaacaagatgaaaatccctacatttttgaggaagataaggattttgagaccagagtcgaaactgaaggtggcagaattcgggttctcaagaagttcactgaaaaatccaagcttcttcagggcattgagaacttccgtttggccattttggaagctagagcacacacgttcgtgtctcctcgccactttgattccgaggttgtttttttcaacatcaagggtacgtaaatttaaattaagcaaaatatatattctttttagtttaagatatttgcatatgagttttgacttctgagtttaatgttgatgcatgcatttactaaccatttaaaataattttatacttttattcaatcataaaatattatttttataacttttaaaataattattatatttatataataataagttataattagacgtcatataaaattattttacactatattttttcttttatatatatatatatataatattaatttattgatgctttttttattaatttgttggtgattcacacatctactgttgatgctgtacaattttgtgaaatttccttacttcatttgttgtatttctatttatttactagggcgagccgtacttgggttggtgagtgaaagtgaaacagaaaaaatcacccttgaacctggggacatgatacacataccagctggcaccccactgtacatcgttaacagagatgagaatgataagctcttccttgccatgctccatatacctgtctctgtctctactcctggaaaatttgaggtaattgcttctaattatatatacatatggattagttaagtttttaataacatgcaaaagtctagagaactagaccaaacaaagttttgatcattaattaaaaatcaaatttcaaaatctttagaaactaaatcaatactcacaattgagttcacatgttaactaattaaagcaagtagaagatggtatatacgatatagttgaatattatattttatactgatcgaaggaaattgtggtgtaggaatttttcgggcctggaggacgagacccagaatcggtcctctcagcattcagctggaatgtgctgcaagctgcgctccaagtatatagacccttaatttctagctatcatgcatcaatattatattatagcataaagtaacattaaatgctactaatttggcttgtcaatttcattaacttggtttcttgtattttttaccaaaatggaaaataattacagaccccaaaaggaaagttagaaaagctttttgatcaacagaacgagggaagtattttcgcaataagcagagaacaggtgcgtgcgttggcccctaccaagaaaagctcttggtggccattcggtggcgaatccaagcctcaattcaatattttcagcaagcgtcccactatctccaacggatatggtcgtttaactgaagttggtcctgacgatgatgaaaagagttggcttcaaagactcaatctcatgcttacctttaccaacatcacccaggtatattatcaacacgcttatcttatctttatttatttatctcattaactgatgagtaagttactagtttttgaactgttatcaactctaatgtagactacgtttattaatttcaaacaataattctcttaattggttgtcatttttttatcagtttggttaatatcttggttgccatctatagtaaatagaacttaaattcttggtaatctttcaagaaaaaacagtacatgtatatatagtgtaaagatcattgacattatcaaccaatttgatattgttcaatggtagtctttttggctttatcataattaaatttttcttaacatgaaaacaagccttgtgactgataacattatattatttccataagatattgtcatggatggtagctagttttttcttacttttataataattaacttattctttaagatgataacgtgatctgggactgatcttgacagtttaaaatttactgcatagatttgaactcaattcttaataatgatttgcatgttctcctataatttaatagagatctatgagtactattcactacaactcacatgcaacgaagatagcactggtgatcgatggcagagggcatcttcaaatatcatgtccacacatgtcatcaaggtcgtcacactcgaagcatgataagagtagcccttcataccatagaatcagttccgatttgaagcctggaatggtgtttgttgtccctcccggtcatcccttcgtcaccatagcttccaataaagagaatctcctcatgatttgcttcgaggttaacgctcgagacaacaagaagtttacatttgcaggtaggcacacacacataaacccttagttatgccatgcatacattttttttatgcatgcatgttcatttggtttttaattagtttattgcaaagttgaagctagttattatatatattgtgtgtaacagggaaggacaacattgtgagttctctggacaacgttgctaaggagcttgcctttaactatccttctgagatggtgaacggagtattcgaccgaaaggagagtttctttttcccttttgagttgccgagagaggagcgtggtcgtcgcgctgatgcgtgagaggtttagaacaatcaagaaaaggtgtgcatgtggctgaagatcacggggaatgtattaagcttcagagactctttaaattaaattttctgtattttgtgttatatgttactagttctttaaattagccagatggagtttatgtgtatctaaatgcagggatgctaatggaataaaatggccacttgtattgttagctatctcttatggtagcagaataagacgtaaactggttctttgctccaagtctaaattccttaaatcatgaatacttacataagaaaagaaaaaagaaaaaaataaaataactatcattataagttaaaagtagaactttttaatattagttttttaaaaatggtttttactttatgcatattttaattttagtttataaaaaaaatattttttttatttctttgtcataggtgttataaaaaaatttatctaaacacaatttaattcatgtaaaaaatttaaaggttgatgcaatttaattcacctaaaaaattcataggttgatgtagtgttataagatcctacagtgttctattattttttgaaaaatttcatgcttaatttgttttgaacgtgtccaaaatttctttggatttttattttttgaaattctattattttttgaaaattttcatgtttgattagtttttaatgtgtccaaaatttctttggatttggtggaaatagtgggaccaagattaatctctatggatattcatgatttctgatataagataaaaaaaaaatgtttccaacgtcctcaatcagacaatactcaatatgaaacgttaatattattatttcacattatatattccatttaataagaaatgctaatctttccataccatttttatatctctattttaaagaattaagattacaacaattgtttgggaaaatatacgctaattaagatttttttttttcaatcctctcgtactactaatctttttctacttgtttatgtatggttattttattaatttattttgtttaaaattaaaaaaaattaccaaataaagaaaatatatttaccataggagtagtaaatatcataggagttaaaaaacttgctggttaataagagaacacacaatcgggataagtgataacccttcaccctcgtcttatccaaaataatctccgactgtagttccgaattgggtggttgagaaccagctgttagtttgtagagactatgatttaaccgtaacaatttacagttttacgtacgccagattcacgtacttggtgatggaaaaagtattgtgaagctccctgtaaactagttttgttatgtactgcatgattactttgggggtagtagctccttccttgtatgaaggcaatgtcatatctctttacatcatttaaaataaataaattactttttgttgtacaaactaaaatactaagttgaaacttataagcaagagaaaattggatgggttattgtagcaaatgaaccttaaggtgcttgccattggcagctcttgattgctatttaaacctccctaggtgttggtatcaatatttattttgacaaaaatgtctcctcataaagaaaacatgtatttgggtgaattatacaatgaatttaagttttcgatcactttatataagaatttctatatataatagaaataggtttttatatactgcgtactattatattttggcattctattatacaacaaaaatttatctccattgtatatgtttaccctactatataatgaaaatgagtatcatcagttatgtatataatgcacatataatatatattacaaaataaatataaatattaaaatataatttaataatgtatacttctgtgtgcctcccttttcctaggaaacagtagtatgaagaaatgagtgtcttgcttgctgttgctggttatgagacacgtacgttaacactcgtccaagtgcgctgcattctccatgcaatcctatattcctttcaataataatacacaaacaatggcttattttatatatcacacggttaacaccttttaactttttatattttttttatcacaccataaatcatataatatttatatttttcaaataattattttttgataatattttattttatacatccaactaataatttttaattctctatttctctttcaatcgtatcatattatatcatttattatattaatattttttttctcgagttattatcggttggtgttaagtaccaaaaataacttttttcatgttattctttttcttttatctctatatacttataacataatgggtatcctatgaaacatttttaacattcccttttctttccgatcatttaaataacacatctacagtgcatgcatgccctcttacatgtcaaagaaagaaagagcgaacacgccatggcgatgatgagagccaaagctttctttagctatcttcctcttcgccttgggcacaaaagaaaccgaggtagaagagctcaaaacgtgtaaaaaccagtgctaacagcaacagcaatatactaagagcgacttgcggatatgcatgcaatgctgtgacatgtattctcgtatgaagaaattaagagcctgagatggagggaaaaggtaatcctcatcagtagtaggtgttagcaaatcatagtccaatatactagggaaaagagtacaccaggagattctcaaaggggctcaggtcgatcaaaggaaggatagtggatttttttggggggtaattttggaaaaataaaataaaataaaacgggagtgtattaagaaatagggagaatggtatagcaaatgccgaatgttagttcgtcttccctcatgggactagccggcccttctcaccttattgggcctatcaacagtgggattttcttcttacatcatcagtcatttttcttctacatccaacatattttcttataattttaacattgtcattcataaggccaatctgtatacggattggtatagaacctacagattattaaaaatatgttttacgtataaaataatttaaaattaatgattcatacaaatctttaattcatgactattgtgttattaacacgatactctaacaaattaaactaatagattaattatgttaaaaaataattaatattgttgtatataacactaaaatttataatgtatatttaatacacatataagtttatataataaattttgtaataattaattttaatctaataatatattttttacatatataaattttaaataaaaattataggtttaataaaaatttatatatatataaaaaaatattattagatcaaaataaattattaaaaaatttattatataaacttatatgtatagtaaatatatattaaatttttttatatataaaaacattaattattttttaatataattgtccagattagaacattatattaatgatacaaaaatcacaagttaaattatcctctcacacgtgtatgagaaaatttgttgaatacaagaagaaaatcccaccaatagtttgggttgtgttttgtcttctttgatactactaatgaaggatagtactttaattaagattttttttttctttcattcctctagtactactaatttttcaacttaaaataatatagtaccaattcatttatgtttattttactattttttaattaaaaataaaaaatttccaaataaagaaaattaattaccaaatagtaatcttcttttttttttatctgagctagatccttggttactagattaatctgttatgagtaatttattttggcaatatgactggtatataacattttattaaaatgtcttcttaattaacttataattaatgtgcatacttctgaaacttcaaaattaacgtacttaaaaataattttgcattccaattgaactacacaatctactagtggcagatttattggtagtaattattagtgctacatgctttgtccttcattcttgttcttaaaattaatttggtgcttaaattgaccagttacgacaatctttggattttgtcgatcacttgatgatgtcatgaagcaattgcatgcttttttgtagcgctgtcgtgagtgaagcacagattaccacagaacagatgatgacactaattcatccgccatcacaagcaccgcagcattgacttccaagctataagcctttccctccctccctatacctaacctacgcactatttgtattttttatttaattaatctattttacatgtattattagctacataatatatatatatatatatagttatatataaaaaatgtaagaaagatagattaaataaaaaaaacacataaaaatagtgttgaatatataaaagaatagaaagttatttagatataaataattatttatttattttttatttttacttgagtaagtaattaacgatagtaattatataactaaaatagataattggggttagctagtcctaagaactataccttgactgtgcattatattcataatttttttttaatgcactttcacttactttttttttttctctttttttttcctcacttattgaaataaaatttaaaaatactcggtaccaaaaataaaaaaaatgattagttcgtcccttacattaaagagataaagataaagacactcacacagaggtatgcgtgtgtaaaaaaacatagaatcactaataatagatcccaagcgaggacccctctcaccacataaaatatgtccctatggaaccatgaattaagtatgaacctggtgcatgaaaagggagcaatcaaggcccggccaggagatttcaaatgaaagagcggcggagaactaaataaaannnnnnnnnnnnnnnnnnnnnnnnnnnnnnnnnnnnnnnnnnnnnnnnnnnnnnnnnnnnnnnnnnnnnnnnnnnnnnnnnnnnnnnnnnnnnnnnnnnnacagtacttgctgaacacagtaactcctaatagaagaaacctgcacggattaaaacacgagagcggttcagctccatgcacgtggctgcagcaaataatggatcatggaagcggcaaaatcaacagtgatcctacgccaaccatgatatcacactcccacatatacatatatattcatacgtacccaattcaactgagtcagtctctgcattcaccagtctgctctgcaacactgctagtatataaccggtgaagtgaattcatgtaggaccatatatatatatatatatatagggtttaataaatgaaatttaatatttcacattgccttgttgactctacccaaattaattatcaacccccaatcctcgtttggcctcttgtcttctgaacatttagcatcattaattaagttcttattcttgccagttgcactatataacatatcttgtttaacaagcaaaaacaatcagagatttattaatttttaatattatatgatagtagtgatggcctaatcgtgacatcaccttatacatttaaccataatgtaacgaccaatacattcgttacacctatatacattttcattgtcttattatggtccatgcctagctagcttgacctagctagcttgcgtatcctgtctcgttatttggtcattctcttgctgatgagatacatattcatacctatcatctgttttggattttgctgttttgatgctacttctacaggacagacacttttactaagctccagtgaacaacatgtacaatcctagaaattaaggagtcacaggtcgagaagaaccggaaattcccttgcacgtagctttgcaaaaatataatgcccgtgttaaaaaaaaaaactcgattgttgatgctgaaaactcgtgaaagaatctgcaaatagatgatgagaaagaaagtgagaaatgacgatatatatatatacacacatatgagtttgtggtgcttttaatttttgttgttgtttgaacaaagattggattggatgatgcattggcgtgaggtaggagtggagtagtactggtgagatcagatctagctagcgtttgttttgacgccttccaaagccaatgaacttttatcatagccctttgtgcaactttcaagcgtgcgtcaatattgtcagatatcagaattctctctctgcaaaatgtgtctgtctctccctatatgaaacttacaaccttactactataacattcgaaaatttgaacatcatcatcatttaccacttaaccaaaacgtttacatttgagacgccagagaacttttgagatcagcatctctgttcgctttttgagagcttaaaaactgatcaaaacgaacttaattgtttgaactcaaagttaattttagcccaaatattaattccttaacgtgagatcaaaagagaccttttacttaaatttgtgttaattattcaattgattttcaacgtaattttttataaattatgtaaatccaaacatacccccatgggcctatatgcactgtgttaaaatatatagaaattgtttaggtattagtgcactaaagttatttaattaatttaaaactctgattgtcatcgtatattgtcattagacaatctatttttaaaaaaattatgtatattttttacttgagataattttgtttggattggataaaattattataaaagttttttctttaaatatttaatataattatatatttaaaactcaaatttaaaatttttagttaatctaaaataacttctcacattaataaatttaattatacatagtataaatcttttgcacgtacatatatattcgcacttgatatcggatgatatatatatatatatatatatatatatatatatatcagttaaaattgtggcataatggttaaaaataatgatataatcatgatcctggaagccaagcatttggcattaggtcatgattctgaagatatttagctaggctctttcatgattcatgatgagtgccccactgtcctatatatgggtaattgggtatcgactatcgatatcgaatatcaagtccaatgcgaatgcaattcaaagttgcaggtaagactttctcttttgtggaatcacttgtcaatttggcaattatgattaagtggtccactccaaaaaggccaaactcctactgatgcatgttgaagtgcacacaaccctagccctcgcatgcattacgtataaccaataaaagtgagtctaaacatttatcattgaaattgtaaagcatatgtaaaagggctgcatgtacagttccactcgatttggttttctgttttttttttttaaccacactataagattaatcttctgcgtacgtttttgagattttttttatagattatgtgttctgaaaataaatttgttcgaattaaattaaattattataaatcacaaaactttgacaccaattttgagcattttacttgattttataatcaaaatttaaactcgagattactggttaaataacaatattattctgtcaattgatccacataagccatagtttcgtggatttaattgagtaacaactatccctgtctttcaatacgtattttgctagagttgaaaacaagtcttttctcataaggctagtatgtatttacaattgaaccatctacttgaattccactgtatatataagttcattcaagaatcaccaccaaatattaaaccagatcattccatttttctattacgtcacttgctaaacttggttgtcaacgacattggggatcaaagattcaggcacacacagtgacagcgtaagcaagcaagcatgggacgatcaggaccccagtggagctgacgtgaattcatcatacattctccaaccaattattgagggaattgattacagctttcgtattttttgtttgaatttttcttaattaacaactataaagagtacgcggttaatgaattgtggtaaaagttattgaataaaaagtatgatatttgatgaaaaagttaattttaaatgtactctaagtatttcatttcaagttatagtttttcgttttaattctataacaaatgttctaaacgcatttgttgacaaattaaaatcgctttttttgattaattgttttacgaagtttgattcatgaaaattggagatagatggatatatatcgtatgacatcattaattatggacgtgttaggtgttttgtcaatatttatccatttatgacaatgatttaattcacgatatttaaaagcaaaaactcctttatgtttttcaattgttcagctttaatataatttatgtacgggacgtcattcgtagttgagttggtatgattatttttgtactacatagcattcgtctttatataaccgttattgtcaagcacaactaacaccaacttacttatcatggttagtataagcaataagtaactcgctcgcaagccctaactcattttcctccactcctatcccctctatagagtatactctctttacctctatctggtgtgccagcatactcgtactgtatgttaatatatgatagtattaattactttaattttttacaccacaaaagtatatatagtagttacttttagcaactgaaaaattaatttttgaataggaaatggtgaatgagtaaggcaatatgaggcagattaaggaccattttagcctagtggggttgtattgtacttcaatatatagtggccaagccttggtagggccagaggaagggggaaactgatgaagtaggtgaacaattcaattacttacatgaaaagtgcaactctctttcgggttggtccttatgcattatatttcaagccatcttcatcatgggaaccaaccttcatattgtgggagaaatatatataggacaccattcacgtgatttacagctaccaactttgaatctttgatccacgaaagtccggccattaattattattgttttatgtaagagatttttttttattaaaattgaatttaacttaataaaaaaaattaattcaagaggaaacattattcgtcttctaaaaagtattttagccatattattagttgatgtatatgtgacattgagttcttttttggtagaaataacttgttaaactgaaataatctatagcctttgatccattaactcggtgatacactaaactctgttataatttgaaagctttattcacggtgctctaattaatatactaatgtggagattagtaagagttaagaaaatagggaattttttcttaaaaaaagaaaatagggaattgaatcttcaagtacgacaaattttatcggtcgtcttaagtaaggaaatataaatgaggtatatttttatgacgatggatacatttatcaattgccaaaaaataaaaaattatttgaacaataatacatattagttggaagaaataatgcttaaaggctaatattgaaaagaaataaaaatagctataacaactttttcaaaatttaaaaaacaaataggaaaagaatcttcttattttacttggatttatatctatacaagtcataatttgaagttgtagtttaaatccacgaatttactgtataaaaaaatccacgaatttagattagaatcaatttcattattcaaaactcatttatctaaattagaatttttaatccaatgcaagtcaatgacaatacgcactaagtttataagaaaagatatgaatttagtaaaaagaaaaatctttaacaacaaataatatgaacccaagatcatagtaaaaagaaacagacagaaaaatttgaacaaatgaaacacaactacacataaattagtatagaagtaaaatcgcaattaaatctaaataaaagatatatagtactagtagtagtatcttaaaatgagggagtaattaattaaaggaagataagaatggtcagctagtattttgctttgaagattttggaaatgagagcccctttaggccgcttctgtggcttctgtattctatagactcgctattttttttttgtccgtcaaaagcatattgtttgcttcgcgaaatagaaacataagtgtgtcaagtgtcaaccccttgtccccacttgaaatttgtgtcccctgttacccccattacattactcaacccattattaattttttggtctaaaaatacagtgcaattattaagttttaaggcgaagaattttatcttatgtcaaaattagtacattaagtagaatcaaaaccctaactagctagtcttttcttcagttacattaatagaggaaagaactttatgaaaattttcaaaacatatttaatgtatgcctttgacagccaaaaattttaaatttgcatgaccaaacaacctgtcttccacttctgtccaaaaataattattgaaaaaaacctgtctcattgacaataaaatcaagataaaatatataagtaatcatcgattaattttttagattaagttaaattttatctcataaaatataagatgatgatatcagaatatatttattatttatttaaaatactagacgtgagatgatgtattaaaaaaaattcaaattttatatcatttaaaataaaattaagataaaatatataagttaataacttttacaaatctaagaataatttttacaacgcaacgaatgaaaatagtgtagcaaagccaaaggtgaaataacacattaacacaaatcgaaaactaacgtgccaaaagcaagtgatttagatttagattcaaagaaggcatagttcaaaccacgaagcacgtcttatcgatccggagagtctggtaaataatgtgatgtctaaaaaaagtgggaacatgatatgaaaaaaccctcagagaatctcatcaaatttgccatttttcataacaatatatacaagtgccaggcggcacgttgccagaatgtcttcaggttaaagttttcgtgtctcccttagtaaaaagaaattcttatctagacttcattagcagaaaatgtgtaccctcaattattaatattcattaatttgttatcattttgaatacgaaaaattcttttataaaaacatttgtatatagctttttttatttacttagcaactataaatatcaatgacttattataaatattaactcttatgtaccttatcaatgacttattataattatgaaaaaaaaatgttatgaatatatattttaaccgattccaaacgaaattaataatatgaatagataaaaaaaactttatgtaactgcggcaaagtcaaatcagaaaaaaaaagtattttcatacatgtttcactaaaactccttactatttttcaatatactagtgtttcttaatttagtattttttctattttaaaataattattattcaaaattattacatatccaaattaaaaaaaagtccactacttattcttaattttaaaaaatagcataatttacttaagtatattattatttccctttaaaatactgttatttctttttatctctctatttttagtttgttttgttacgaagctcgtgttcttatttatgtctttttacaatttaagaaaatactagtacataattgaggtaattcataaataaataaaatattaaatattaattaaaattgaggtaaaaataaattgatagcatcgtagttatgatttttaataatttaataattgctcttacgattaaaaaatgttgttttaacaacaacaaaaaaaaatcttataagtactaggtatagtttggaccgtacgagtcgtgctgagatttcccacggaagaaaagaatccgtttacagcacgcttcgaacctgaggatgacacgtaggatagttagtggagttgtgattcactctcagcaacagagcgtgtagattagaagagagaattttgaaagccaagtggggttggcagagaaaacctagtttgtgtattttgtgtaactaagtctaaaaccattttcagttagcaaatcgttcttagttgtttgttgctttcccattacttttccaaattccaagttccgattccgagtcttcaacacttcccttgttttttggtttttctgttccatttaggttgtggtaaaaaagtgaaagttagaaccatgataacaacagtatctttggcatccctatctggactgcattttatattattgcccgatctatctttgtcatatcagatttttttaatattactatcatactagtattaaataagagttttttttataaataaattttgatttgaattatgtttcacaacatattttaattttttttattaattaaaaaattcatttgattatttgataaatattttttagtaatttctcaataaattctgacacttttaaaacactgcttaaaataatatttttttaaatactagatttaaatttgtaactttttatattttcttctatttttatttttaatatatttatcaaattttctgtttatttttttaataaatcattacttcactaattttatcactaattttatcgaacatctataatttaataaaataactttttgactttcaacaaaattttcgattaattttatgaatcataaccttattagttttgtgacaaatgttttattataaatgtccttgaaaaattcgaacccttcccttcttcatttatcattctctaacccctagatcaaaccatatatctctgctattaaataagagttttgtatataactttcatgttaactatcattataaagtatctttaaaaaatagtactattagtttttttttcttataaattaagtcacattaattagtcactctataattttaattattctaatttgtcataataaaataactatcatttttaattttaaaattaacaaataatttaaaacaaataaaaataaataaattaacagttatcttgataatggagaagtggcatccttgtggtgcacacagatttgacaacttaaatgagaaccattattattggtccgttggtccgaaaataaattctctgaaaggatcaacataggtggatgagcaaagcactttggcacgtccttttctttctattgcatcgctataacagtttatgtcattctttattagaactacttttcaaaatcctcacatgaaatattctacaacatggcaatgccaaaaaggagtgcgattacaagatttattaagcatgggccaaattcaccgattcatcatacaacaaacattgacggaaaaggtgttgatgttgcccaaagaatcattcccgaatcggaatgaaagtaaaagaaaaaataaaaggggtcataatttggaatttgggtacaaaaataatgacttgctgataaaagccaataaagcaatgtatgttgtgcgcatttccttctttccttttggttgcaactttcatcttaacaatcagaaaaagaaaacactacaacatgttgaaaacaaagccataataaaattttacccataagctttaatggtcctcggtgaaatcattagctgccacgagaaaagaagcttcatatacgtcagaacttgcacatatcttttctaacacaagcaatgagtacccttcacagcggtaattctttttatgtttctgcaacacatgcaccaaagaatgaataagaaaattacatggtttattcctagctgagttgtaacaaaagtaaagtataaataaaaatactactttacctcattttaatcagaattgagatggtattttacatttgagtcagacagtgattaattagtctgccaaaaaagattattcagtttctgtggttgtgtgcaaaatcaaaccctgcagctgcaataaagaggtatggagtagatttagggaaaaatcaaaaaataaaaataattacagagaagccgagaaaaggagagaagggaaaggacaaccttaattgggagtgtgagagtaacagaatgtttacatcaccattggggctagaattccccagagcattgcccacctacaataacaatagtgggggaccaaactacggataagaataagtcatgcaagagatctcaaccaaaaactttattaggaaggaaggcacagtcaaatgcattgctgtcaagaaatctatgaactaaataatattccatgaacttatgaaaactgagtgccaaaaagtttgaaatgaatatagccaagaacagacaatctaagtatttttttttccatgaaatggatccccaatgctttaaccagttttatcaattacataaaacatgcttctaggaaaatgttatgtatttaaagatgagtatgtggagaatttgtagcatgtcttcaatgaattttttaattgtaggaagcatagcatacttggtgacaaagtagagtttgattcttttgtaaaatgtgaatgacattcaagcaagacagaaattaccttgtatcgtacactttgctacttcagattcttcaattggtcaggttgatcagacggaatatgcattattatagcattcatcagaagaaactcaaatcagtgtaactgtaaccgtgtgaatgaggcaacaactcttccacttcaatccttgaactggagcagctagagcattttttgattcggttacggctaacagactcaacttctgccagaaacatgctataaactggtctatgatctgagaatcttgactccccacgaacgtacgataattggcggaggcctcttccataccacaagatacgatcacaccttcatgaacaaagatttggattagattcacataaacaatgacatggtactagatccaaataatgaaggacatttcttatgataatggcattattcatatgtctcctctcttttccatttatgtattcattgatacaggtgattattagcataaaagaagaataccatgctggagttcttctcttttgttttgactgtctttcatcgcctgcatatctatctgaattgtttgaatacttgtatgtgggagggaaatatattttcccctcattccatccttcaaagactcgaccttgtctccgctctatatgtagctgaaagaagaagctatgaaatggttaggatgatattatatataatttaagaaaagaagctacactctaacaagttgtaaggaaagtatcatgcctggtcattctccaacagaaccttccaattatgcatctcaacaagagcctttgctgcacggtaagaaagggctatccggtaatttaaatcccccagccaaattattcgactacaccaattaaaccacaagtttaggtcttggccagggtaaaacttaagacttaggactgcattttatttagtttcacgatctctaagcatcagttgctagtaaagattcaaggaaaagagatgaagggcttactcatgatccagaattgtctgaggagaactctcatctcccatgtcttgaactcggggaaaccttgtctttctgagaatctccattacatctgaattcctccttagttcatcaccttccttttgtccagaagtcaaatgactacagatgaagcaaaagcttgtttggtgcaaagacatgctaattgatattgaaccctggaaaactaaagagaatgagaatgcggtctccaggttcacaataaactcttctcataaaaaaatatatacatcaaattaaaaaattaccttgtttccaagatatcccattaatcctctgccaacacaagacactttcatattgtgaacatcatctcttatatcacttttcacccaaactgttagaaatattccaaccatttgcttactagcaaccaaacagtatcttgactgtcctgtctgtctaaatctatcctccatagagaagcaacctctatatgtcattggtgaataatgtgttacaactggggagtcaccagggccattttcatcatccgaggaagcccatctataacaggggtcatagtcacttggcctgtgaccaaacatcattctatcacatacgctgagacgacgatcaaggcatgcttgtggtagtgacatgtcattgtccattctcatactatgactcaaggattggaatgaccggcgatggaagaaagaggtcgtcttctgcctcattgatccctcaaaatcagcatctaactctacaatagggtcagggagcggtgaagtagtgtggcattcaccgcttgttccaggaagactgtttagggtcttcctaataagagatagccactttctggcagggccattatcttctgtgcccaaaacattgccagcattgagaggtacaatttcttgaaacctgagtgcaagaaaagtcaaactagttcactcttgaactgtatatggtgaaaggagagaatatacaacacactatacaaatacaatgagaaatttacccaagaacatagatatcagcaggaggagaagagtgaagccaatcttccagactcaaataacttggaggagattttccagctacattccaagtggcagcaaagattctgtatgcaggagaaaagaataactcaatagaataataattattctgaatctgactacaccaataattaagcacaacaatgtacagtaacatgaagcatacctatagttatgcacatctgtaaccggagctgcatcacggtcaattctacctcgccgcattctatctgagtgtctcctctttgctctctctgcattaaaatataaattatctctccgagagacatagtaggagacaaaaacaagggggggaagcaaaaacagaaaatttctgaaatgtatcggtactgaacctgttttgcttctcttgatagtgtcttcctccctctgtgagcagttcctccactcttgattgacacctgaaaaagaaaaccataaagttaataaagtcacactctttccactgtaaattttatcaaaccacagaatgaatcaaacacacaaaccagaaaaaaaaattataacaaaagatgaaaaccaaggaaggaggaaaacaacgagctgaagagttcagatctttgctttttagttgcagactcgttcaaacaaaaactgttacacgaagacaacccaagttccagaagaagaagaagaatggaagtttgtttattattcagaacatagaaaacttatgagggcaagagaaatctgattcaaacaaaaccaatcctcatctttaattacaataaaatcatgagaaaattgaccaatcacctgcgtagaggacatcatctgcctgaaagtcctcgtttttgcttttaatgttgaaccacttcttgaccaacgttttgggccatgaaagcttcagagagaaaaaacaacaacagagagattaagcaatggcagaagcagaacacaaatgcaaaggaatctgaagggtagagccattcaaaccttgcttttcttcgagttgtcatctctcattgttgggacaacttcataaagccttctgaattaacaacagaaaacaacccaatccaataataacctttccttgttgaagagaagctcgagtataataataataaagacaagaggaagaggctcaggaccctaagaacatgggtttcgtttcactttaatttttggttctgtttattaaaagggaagaaaaagacataataacgggatggttgatcaaacatgaaagcactcactcggtaaatgggagaggataggaacacaacaaagtgggggaaacagggcactcctctgtttcttaggtaacgttgagggaacagaggaaatcccagtttgtcaccattttaggcaatgtggtacaaataaaaaaaaaaaaaacactcactcacatggtcgtgtttttggagaggatgaaaatccaagggaagaaagaaagcgcagatgggacaaccccccctgatatgttataagaactataagagattatgaggcacaatgtgctagtttgagagagagagagagagagattctctcttgcaaaaccaaaccaaacctcgttatgggtacagagcaaaatatcgaatttgaagggagggaataaagtgaagcaagcttcgctctctctcgaggccttttaccccaaatccaaggctaaaccaagcttaggaacttggagacactagagagaagcaatggttatattggtctctctcagacacacacacattttctatctaaaataaactaaaaatgtgcattttcactctactaacttaaagttaggtttgatcttattgtgccaaactccagcagtggtactagcaacagtatcacatcacttccttacattgtctttcttccagcagataaaaaagcggttaaagggagaaaagttaaagaggtggatgtaatgttgaggcttgctttgttttgttttccgtttaattttctcttgttttgtttattgtttgttggaatcatttgcattgcacaaatattccttttgactgtgactgtgtctatgcatatttgttgcatacattatatacttttgcatatattatatacttagtcactgtcgaacttgaaagtcgaaacgatccttttggatttaattttcctattttgacaaatatatacacacttttacatgcgtatgaaatcttgactttgtttatagttttttaagtgtacaaaagcctactagaagtgtggtttagctggtcacccaatatgaaaaagaaggaactactctaccactttgggtaaaataatagataatgtcattgacatgctattttattatatctttttattattaaataaattttaatttcatttcatttgcttatacttaaatttactattatttaataaaatttatctaataataaattatatattaaataaatactactatcgtttctctctacctaaaatataattagtgtataagccttcttatttttgcaaggctggaatcttggatggtatgtttggtgattgaaagaaaacaggaaaagtactcctgattacagggtcccaatttgcaatttggtttttgatgtcgtacaacataaaaatcaatgcctttgataaatttataacaagatttattttattttatttttgaaactattctagattggttcaagagctcattatcaactcagagtatgaaccaatctgttcacttagtttgtgatttgaacacttccaaaatcaaacgcctgcttcctgttacattgatcatgtcaaaattctagaatatgttggctctcgtgttgtctgcattacaggcacagttaaagaggttcatggagatcaatttgcatcacttaatagtagttcattaattcacaacatagctctataaatgcaagtcataacttcagttcagaatttgtgtgtgttttttctctcgcttaggttgccataattgataaaagatattcggaaaagacctcaaattttttttagtactaatatatttttaaaaaaaattattgtaaaattatatttgaaaataaattttaaataaaataatgataattttaataaactattttatgagtaaataaaatgcttcatttttaaatttgttttaggcttttcaagtccttaaactatccctaattttgtttaatgaataacttttcttaagaaaattttgttgtatttaagagttaattgactcattgaataatcttaaatgagtaaaattatttgtgattttaggtgaatttttattgacaatttaaacatgtcatacctaataatatttaaagtattcttatattttataatatttctaagagagagtttctttgtcgcctatatcatttgagagaaataatattattatatgaagaaaaaattaacaaataatttagacattatcatatgcataatatattattctagttgcattgctttttagtataactatttcaaatggagttagatttgactcaattccaattactagttaatggagaaaattgtcatgttttctaatattacttttaacatatttttaaattacataaaacatattaacaataacaatatattttagttttttttacaataataacaacgagaattaaacctaaattctcacatatatatatatatatatatatatatatatatatatatatatatatatatatatatatattatttaaaatcctccactaagtcgatcctaatgaataatatattgtagtgtcctaatgaattttgagttttgtttttaatcaattttggtgcctgttaaataaaattatttttagaaagaatatgttttaaaacatactactatttattttgagaacaagtttcatttgaataaatatataataaaattacttataattacaaataaaaataaataaatattaataatatctaaccatacaaaattatgcaggcacattaataattaagaaagtacaaataaaattattaaatttttatcttttaaataattaaaaaaattaataaaatatactaaatatcttttaaacacttattaagagtattatacataaatggcttaaatacattttttcctttaatttagaggttttttcattttcgatattgtaattttttttcttttcattttagttattgtaaaatatatatattattcctaaagtattttaaataaaatttttattgtttaaaacattttttaccgttaaaagtgttatcaaaacacttcaagaaaaaaaacaaaaaaaacatattttacaagaatcaaaatgtaaaaaaaatttacaaaatcaaaattaaaaaaacactaaattataaaaaccaaaaatatgtgtaactctccataaatttatcccttcaaaccacgttgaggcaaaattatcaaaacgttgcttgtctctcgacgtatgcttacggtgttcagggtacatagatcacaaccaaacaaatgatgtctgagggccaaaatgaagctttaaaccaaaaaatcccaaacatgcctttacagaaaagaaatttttaccaagacatggggtcttgtattaagtactttacatttgcacatggaatgcgttgatgtaatgtaagtattataagtttgctttgtgtgacgcgttgttcaatgaactagtggttcacacttcgcataaatataggatcttggtagaccactggggtgttcgtaaacctatttcatctcaaacaaatagtgagttgacacccattatgttatttactaacaaataaagagagagaaacaaaaatacagatataataaattttttaatatgataaaaatattaaataatatttaaaatattaaaatatttatataccattattcttaattttatcatccttcttaacccatgcgatctcattgggtattatgaaatgaagctatattttaatggattaagcaattaagtgctatcttgatggtctaatattagtaacgtggcacatatgggagatcgtgtctgcaattcctcatatcttaatattctcatttttcaacgatcttttcttttagcaatcaattatgttcaaattgctgaggtaacaggtaacttgtcggatttggtattcactattcaaaggaggagtggtcaaatatttatcggttttatattaaatattttaaattttatcaaattttgtaatgcattgtaaagattttatgcgcacaaattatataaactaaactgattcatatgatagtatatgatagtaagtactattaaattaatttttcaaaacaattattaaattaaatgattatatacagtaaaaaaaaattcaccaaaaaaaaatacagtaaatcttaatcatttattaatataaataattatgtgcatctactaaaaaaatgtcattataataatcgttgttagttaaactaatatttcaagaattaggaaggaaaagattattaaactaacaggttacgcaaagctcagcaaattttaggtcaatctcccactatttgtcgtataaacctaaatcttagccctccaattattcataagtcatcaagacttgtccagtggttgtcgcaaaacaaaccaaccatcgtattgtgttttagtggtctgaatggatagggaaaaaaatagaggggagaatgaataacagcgtgggaattcattagatgagtttctatagtgtcaaatcttaacagcctagcctaaattaattagcatgagattgttataatttaattagttagtagtattaaatatttagaagggaaattttatctttcaaaaggatttttatctatctaaaacaatattatctcttgttaaattaccataccagaatatatatagttaatagcaaaccagaaaatatatattaatagtctgtgatacaaatccctcaattttgagtttgcttaattcagttgttaattaagaatcattcgccagatactatgttccaaggcaggggaaaacatttcatttgggtttaaaggtcttaataatttacacttgttgaccgaaaaccacaaattgaatatgacagatgcaagatttctatgatttggttttatcccctcttcatacgctcacaattaagaacaaatggggtcccaatctaaacgtttacttcaatttggatattctaaaatgaatcgtgaaagtttgttgctgccttcagagttaaaaaaaaattggaatctgccatccaccagggagactatacttgtttatctctacgattcctaattaggtgtttttccttctcccttttatgagagattccatttccacacaaggacggatgcagaaaacataaaagggactcaaaaataaataattaaaattaaaatatatttttcttccttataaaattaataaagtttattttttattcttgaaatttattttgttactttttttatttgaagtcatgtttggatgactttggtatttgtctactgaaaattacttccctttctcttctcccacaccgtgctccttcctccgatcttgtctcaccccggcttccactagctcgcaacggcggcgccgtcgctctcagtcgccgcaaccaccgcttccgtcgcttggaacgatccttccactatcttcgctccctccgatgcttctcgtgccccattctgaacgtcctccgcaaacactcacctccgacatcaccaccagcagtcagatccaaacccaaaacgcccaaatccggttccaattacaattccctgtttctgggcatttggccatggacgatgatttttgctgggtcgattattccatttgattggggtgatctcactttgatgaactacaatgacttcacgtgaatagagatttttaacttcgattacaaaattagcaaaattcctttctttttgttttggaatatcccaccgttacggtgtggatttccttctctgcctctgattttttctatttggtatttgttatttttgtcaattgttttggtcttgttgatcgtccgttttcataggagtttcatgatttgttgctcataattgataatgtcacaataaatggagacatttggtcatataattcagtttttccttctttttttgtgtcacataatggatttatgttatgtctttgtttgtaggtttgagacatgagatttgctagtcagttatatttttgaggtacagacttttccaagagttgctataaattagagaaacatagaaatgaatgaatgtagtaataaatttgcacacattttcataattccttagaacagtttagatcttttcttctgcaaaatttgggtactgcataaggtttggcagtgcccatgaatgccacaacagctgaaccccccaactatatatctaattccataacatttcagctttgttcgagtatgaaagaggggtttaaaagataagattgtgcaaaaagatccattcttgctttttttttttcaatttgtgataatttttaaccgttttaattttttattcaatttttggtgatttttaattctcatgaattatataaatttataagaaaaaaataacaaaatgagtttggaatcatgcaaacttaacttcagacaatcattataattttataaaaacgaaaaatatattttaacttataattaattatattaactaataaatattgtcatatgatgagtattttaaagtattatatatatatatatatatatatatatatatataactataaaataaatttatattatattgacggtttaaatctgatgcaagtcttttgttttgacttacatgctccaattatgaatagatcttatcctttaatatttagttattcttttttaattctccataaatgtttataactaatgttaaaagagtccattttcaa

SEQ ID NO: 320 - DNA, 6071 bp, Glycine max; identical to SEQ ID NO: 264
  source 1..6071: mol_type = genomic DNA

SEQ ID NO: 321 - DNA, 4255 bp, Glycine max
  source 1..4255: mol_type = genomic DNA
acccacatttaatattgtaaatgtaaattatgggtacaatgactatacaaaaaaaaaaaaaaaaaaaaactcacacaaatcatgttatgcaaagtataaaaagaggtgctttattttttttccctctaaattataggtattcttgatcaaagataatcatgtgtgtgtggaaccaaattgtatagttaatatagtaaaagagttgtgtaatttgatttaatttatttttacaattcaaaattgaattgaaccacataaaaatttgaatttttaaagtcattaaaaaagacaacaaacttcgattattcattttttttaacccgtgttaaaactttggacaaaagaaaaaaatgaatattataaaaaattgtaaattttaaaggacaaagggcaaaaattggcttttatatatatatatatatatatatatatatatatatatatatatatatatatatatataataataataataataataataataataataacatcaagaaattttaaaggatgacctctatacatatttctcattaccgtgtcaaggtacaacacattatatatgtttagtaatcttaccatattatttcactagttaaataaggatgaattttggatgatgatgtcagtatctcaaattttggcttcaatagttagagttattaggtagaccgtagagattcgggtaagtagtctgcaaactttcattttcaataactttttaagtttcaatatttgatatttcattcgtaagaaacaaatattattatttggttgtgattttgttttcttttttaaaaaaggatagaattaccattactcaaacttttttccaaaaatacaccttatgattatgacaattatgaattaaatttttttagagaaaatggtgaaactaaaaaaattccccaatcaaggcaatagtaatattgagtttgaatggcaagcctagacttatcgctggaccaaaactttcctataaataccagggaagttcgtcccttttctcatcaaggccacaaactctgacttattttaatttgaactttaaagttttgttattttgtgcaatggcagcaaagagcaaaatcctagtcattggaggaacaggatacattggaaaattcatagttaaggcaagcgcagaaacaggacaccccacatttgtcttggttagagacaacaccctttctcatcctgaaaagtctaaacttgttgagagcttcaagagctttggagttactctgctttatgtatgtgcctttcatttacaatttattttttcttttcacaaaagaaaagaaaaatacatacagtactatttcaaatttcaatccaactttttttacatctctctgtgattttgtagggtgatcttactgatcatgacagccttgttaaggcaatcaagcaagttgatgttgtaatctccgcattaggtggacaacagatagatgatcaagtgaagatcatagcagcaataaaagaagctggaaacatcaaggtacgtacgtacatgcataacccttcttttacaaaagtactattaacttaatccctgcttcattttgtaaaacgtttccatatcagatattagtgcacaaggtattaaaaattgctcctaaacaccatcatcatcatcggcaagaaaatgataccgatatagacagaaatctcagcatggttgcaaatagcagtaagtcagtaaacaactgcaatggaacggtgtttcagcgacaacaagcacataaaaactctgggttttttttttcatatttaatcattttttagttacttattttttgcatatttttttttctctctattagatcaaatcaatttatccttattcgtaagatccgatactggaatttgctaattgcatgttttcacaacaaaaatcattttgtatattgttcatttatattatttaaaagagattagtttttatgtatatgacttttaaggtagttttttaatttaaacctccaaatatgattttgaaattaatttctttgatgatcagaggttcctcccgtctgaatttgggcttgacgtggaccatcacaatgcagttgaaccagtaagtagctttttcgagaaaaaagtgaaaatccggagggctattgaagctgaaagaattccatacacttacatcacttcaaatttatttgctggacacttcttacccaacctgctacaacaaaatgtcacaactcctccccgggataaggttgtcattctaggagatggaaacgtcaaaggtaacatacaatacatcaaattaatatattaccgttttttgaagattatcaattttctttaatagaggttattagtaagattaagtttctcatgtatagataagcgtacatgttacatttgttttagcatcttgatatagaccttcttgtatcagggaggcttttgattttctctaaatgcgtttattgttttatcattttgggtttaatataatttacatttttttaaaaaaatatattaccgctttttccaacaagtaaaagataatagacatgcagttcaattgaaattcttgtttcaggagtttatgttatcgaggaagatgttgccacttataccataaaagcagtggaagacccaagaaccttgaacaaaactgtgtacgtgagaccccctgccaatattttgaccttcaacgagctcgtgtccttgtgggagtacaagattaacagcacccttgacaaaatctacattcccgatgatcaacttcttaagagcatccagggttagtgtgtactttgtatactctcatttatgacttttttgcggtcacaaatgcaacttataagagtctttggtctccgttgtagtaattttttttatctgtgcagagtctcctttccctgacaatttcatgttagcattacgccactcatttctggtaaagggagattgtaactatgagattgacccttctttcggtgtggaagcttctaaactttattctgaggtgaaatacactactgtcgacaactatttgaatgcgtttgtctgaaatcaatggaatgcgttattattgccaataaactgcttcaccaaaaagtcaataaaaccatatagtagaatcttgtgtattgctcgagcatttgtaatttgtctttctctttaagtagttacctgttgttgtgttgtcgtcaaaagactcctctcatacttaaattgtactgttgttcttctaatacaagttctattacgattattcatttatttggtcactctgatttcattagattttttttagaagattaggtaatttttagatatgagaaaaataattatactataaaaagatttacaccatcttctaattggaaaactttggcttatttctggtaccaaaactataaatatcaggaaaattcatccattttccgattaaagcaacaaatcacagtgtataatactctactattaacttcggttgtcttaaactctttaattaatcataagagattaaaaagttaaattaaaataataaaaatattttaaaaaacaaaactatgtttcattaatattaaaataaaattatagcaaaataaattaacattgtttttttcacaatttttatttttaacttcctaattgatatcataacaaataaaaaaagaaataaaaatgacttatagaagaaataaaaaaattagtttttatcaccatactatcagtggttaaatagaagaaaataaaatactgcatagctaggttttgaagattcaaagggatttaatttggtagtgtaaagcaaccaagaatggtgctaacccgagtctagctgcatgaagaagtggggtctgggtgccaccttcattggctgcctcaagcctatgaattgagagactgagagctacttttgttacagatttttctcacaagtgcggaacttgttcttaaagtaagtgggaaactaatctccatacgaattaataggcaccggagtgaaatacaattcagctcaaatatttcgcaaaacaaaattgattctgtgattttaaataagtaacatccgttacaaaaatgagctatcggtttttaaatgataagtattctcattgtaaaaatgacttgtattaattagccataagcgtatgatctgcatataaggggctagatatgaagagatttaacaccataatcaaaaatcttaaagactcaagtttatgaatgtttcattcacctatgtgttcaactttctcattttcaatcaatg

SEQ ID NO: 322 - DNA, 8892 bp, Glycine max
  source 1..8892: mol_type = genomic DNA
tatgttaagttaaaagatatttatattttaaaaatgaatcaaaactcttaattattttgattagatgtaaataaatataaatgataaatattgtgtctgatatactatccgatcataatatgtattgatgcatctttatttttaaacaatacattcctaagacgatttaacataacatttaaataatacatttaagactttcatctaataatttgtgtttaagattttttaatgcaaaaaatattctcatagaatttgtatataagcaaataacataagaaggggggattaaattgtgtttttagaaatttaatttttttttcttaaaacaaataacatgtgttatcgtctaatgtaaaaagacctaaaacacttagagattaggctaagtaaaaaaaaaagttttatttgtgaaacaaaataaaatataaaatctaaaaacaaattatatatatttataacaaacaaaataaaaatattaatttaatattttttatttgatattattatattttatgttatcgaaattatatttgttaacttttttaagagcgatatggatggagtaattttttttttcaattaccaatttaacttgttgagggttcttgtcaatttaaatttaacatatatgcacattatttcttatcaatgacaacgcacaataaattaaatatggaaagaatcatacgcaaaaaataatttcaaactttaacaaatgttattcgatatttttttctaataactatttgaagtttttaaggtcagggacaaactgtgttaatttgagggtgcggggattgtgaaagtgcaggtccttcaagaagcgttcaacatggtcggtcaccttgtcatttcagacttcagatacagtcacgggttattttttttacaccattcaaattttttgatacccaacatatcgtaaaaaaaaattaattttatcattttttacgtataaccctatggattatgaattgccaatatgtaagcccataagcatatgaattgatatgagacttacggattcctatgaggcaaacgaattgactattttttcttctctgaaaaaaagagataaatacagtcagaactgtgttgggaacagaaagcaactttgttggcagataaccctgaaaatctctgaccactggcaacctcacgatcaccaaatcaacaattgaaacccaaaactacctttgaactcgcaagcaacctctccagttgatatgaaccatcgaaatggtaacatgcataaaaaacaaaacaaccacgtgaaccaaatccacatgttcagaacaaaacacacaaaacaaccccgctcccacctcacttgaaaaacctggaccgttcgcaaagacgactattggaatcagcatcagacgtttctacctcactccggcatgctcaaatgatagttttctctctccctcgatttcctacacactcgaatcttgcttctcttttgtactttgttttgtagaatttgcctttttttctcttttgtagttatagaagtttggcgatttaattggcgttaaacgaccccattttggttgcgtgttctcgcttctcaaggttagattttgagtggctttgttgccatttaagggtctgggtttatacttaaatttgtgggatacttgttaactggacgtgttaggatcgtggtgttcttgttcgaaaagagtttgatttggataatttgtgttagataatgcttgaggttggttgtttgggtttgatttgggttagtgtttgtatcaatttctggcctaaatgatttttactaagtaaatgttattgtaaggcttttatactgtatataaaattacaagtttatgtaatttattttaatattataatatttataaatccttgattcatcacggagattaatttctttcactatattcaatttcattgtaggaataatgttttagtctcattattatcattttttaaattataaatcattttcatataacttatgaaattaattacgaattaagaattaaaaaatttagcctatatttttttaataaaaatatacttatatatatatatatatatatatatatatatatatatatttataacaacattttttcccctcttgatttgatgtttacaacaacattaatgtaaaattgaattagaaaaaggaaagatatgagtaagaggcgagagaggcttgactgtttgagacttgcagagatctgtctccatcatattttgtaagctcctcttggatacaaagcaattcattgaacttgaccataggaataagaatattaaattacatttaatttaagcaacttgttctgctgctattcatttcttttctcttgtcttgcttttccatccatgtaagtttctcatccatagatattttatattctgctctccttctccgatgccttaattttcttaaggaatatcacatgtgtttaagagttaggcgttcgattcaatctaaggatagggatagtactaacctgtttatttttttatggaataaataactaacactgtttgttgttcttaattgacccaacccaagggcaagccttttatgctctaattggctgctgaggaagaccctactttgaactctctatctctgccttttcacaactttgttccatttttcatccacttcgccacgtttgcaatgctttttttgtacatagatggtgccgtgtttaatttatactccatgaaatacatgggccatgcttgatacattgttatcagttctgcatcacgtatttgactattttgtattgccttcttaggaactttgcatataaatgttcacaacattgttattgttgcaatttggtccttaattttctagcaatcatttcataatttatgtattgatttgatattgtaataaatctgttcataaccagatttgaataaaatctgaattatgaccattggtgatagactatttctaaatgggcagatgtttcactgtccatggggggcatgggcaccttcgtaaccaaagaaggacaccttcacaggagtaaggttagaaactaaatatccatggctgtccagttactttctaatttttctccctgattactgcagatttagtttcctcttcggcattaattctgcctatatatcagtggctgtgtcattcaaaaataataagagaaattaaatatttccttcgctattcttatagtcacaaataaggaaaacaaagcataacaagaggtcatctagaagctctgagcgagtatggtattattgccatgtatcctaagcctcaagaaattcttacatttggtaaagccaaggagattgaaagtttttggcagtgtataatacatgcagttatatggtgtatttggttggtgaggaatgattgcatctttatgcttcagaaattgtttttgaataagattgtcttctagcctctatctggttctcctgtggttcttttgagggagttttcatttatcatacggagagagactggagagctggacagctttgttgaatttttaatttgttttggaggatattttatcctccccttgtttcagtttgtcttctctcataaaatatcattttctattttaaaaaaaagacttgaaaagttttatatcgtataaccggtagtactctgtcatgaataaactatcgtaaaagcttaagctattgggtgaacttgaatgattttatattgcatctctgaaatgccccctcacacaatagccctttgggattaaaatgtggataatgcacacgcccatctatcttgcgctgaaatttatctttccattagaataattggggcaacattgatcgaattttagatcgatcacttgaccgtgcaggcttggataccatgttaggaaccaactatccccaaatgcttaagatgttaggttaagacatgaatggtttgttactacatctctaacttactgtctcattttgctgcctttgtttaattaggtcagttcaacattatagtttatgattttatagtacataactatcttattttaattcgattttcctcttttatctgtggttagaaacacatgccagggggaattgaatgacagaatgttctgacattaatattcatttgatagctgttttcattcgaatattattgttgttttcatctgttccattcccatctatctgatgcttaacttttccatcttttaatgtagttatgtgaaaaaggaaaaatcgcctgaggtggttcaaacactatggaatcctgcaattgtattgacccacaagtgccagctgatgacttattgatgaaataccaatatatctctgatttcttcattgcccttgcttatttctcaatccctttggagcttatctactttgttaagaaatcagcagtatttccatatagatgggtccttgttcagtttggtgctttcattgttttatgtggagcaacacatctaattaatttatggacatttagaattcattcaagaactgtggctgttgtaatgaccactgctaaggttttaactgctgtggtatcgtgtgcaactgccctcatgctggtacatattattcctgatttattaagtgttaaaactagggaattatttttgaagaacaaggctgcagagcttgatagagaaatgggcctgattcgcacacaagaagaaactggtcgacatgttaggatgttgactcatgagattagaagcactcttgatagacacacaatattgaaaacgactcttgttgaactgggtagaactttggcactagaggaatgtgcgttatggatgccaacacgaactggtttggagcttcaactctcttacacattgcgacagcagaacccagttggatacacagtacccattcatcttcctgttatcaatcaagtatttagtagcaacagggcagtaaaaatttcacctaattgtccagttgctagattacgaccttatgctggaaaatacatgcctggggcagtagtagctgttcgagttcctctcctacatctttctaatttccaaatatatgattggcctgaggtttcgacaagaagttatgctttgatggttttgatgcttccatcagatagtgctaggcaatggcatgtgcatgagttagaactggttgaggtagtcgctgaccaggttagcaattttccattttattcagctgcctttctagcaaatttcatttacatgttacatgtctttacgttagtcgctcccaattcttgtacatggatatatttgtcattcattactttttgggtaagtttctagattttggaatcgtggcaaagtgattttttttattatatatttttttgttattatctctaatagatgagcttaagttttttgatagattgtattcatgtatggttctctcaagttcaacatattatatttttatcacacaagagccatttgagcttgaagcatggacaatgcgcagacccaactactttgtgcctaatttttttattttatttttatcttaaatatgtttggacaacaaggattgaactctagaccactaggtcatagtatagggattctgatatcatgtgatgaaatcactctccaaaaacctttagcagttaagtgaatacacatgaacggttttatattatatttttaaattattttatagctaacccaacctaactaatgagaaaaagctggtggtggctgttgaattaattattaaatgatgtactatggcgtagtgaaacatttgacataaaaatatgtttgtgggaaccatcagtttttgtacttcattagtctatcaattgaatataccttcaaattacctatgacaattgtctcctgcattaggtagctgttgctctttcacatgctgcaatcttagaagagtcaatgagggcaagggatcagctcatggagcagaatgttgcattggatctagcaagaagagaagcagaaactgcaattcgtgctcgtaatgactttttggctgttatgaaccacgagatgagaactcccatgcatgcagttattgcactctcttcattactacaggaaacagatttgacggctgagcaacgtctgatggtggagacaatattgaaaagcagcaatttgttggctaccctcatcaatgacgttttggatctttcacggcttgaagatggcagtcttcaacttgaagcaacaacatttaacctccattctttgttcagagaggtgaaattttcatgctaaatcctgatatttaattatattagtctgacttcgagctgatgatctttagtttctttaaaagcttgatgttgatctgttatcctgattgcaggtccttaacttgattaagcctgttgcatctgttaaaaagttatcactcacttcacatatagcctcagatttgccaatgtatgccattggtgatgaaaaacgtctcatgcaaactattctgaatgttgttggtaatgctgtgaagttctcaaaagagggctgcatttccatctctgctttcgttgcaaagcctgaatcctttagagatgctagaattcctgactttcttccagtgctaagtgataaccacttttatttgcgagtacaggtttgtttcttcaagcttagttaacaaacttcttccttagggtattgtgttctctgttatctgactacaatgatggagtttaattttttacacatcataggtaaaagattcaggatcaggaattaatccacaagatatcccaaagatattcactaagtttgcacaaaaccaatcgttaacaacaagaaatcctgctggaagtggacttggcctggcaatttgtaggaggtactattttccgccttaaactaggacgtgaagcacagttatttattttctattccttggaatattgtaaaattggaatcaggttctttttagaattcctattcgagatttttctgttcattatgtactgttcttttaaattgtgagcaggtttgtaaatcttatggaaggacatatttgggttgaaagcgaaggtattggtaaaggatgtacagtcacttttattgtaaaacttggaatcccagaccgatcaaatgaatttaagctaccttttgtacctaaagtaccgggaaatcatggatctacaaactttgctgggctcaaagttcttgtcacggatgacaatgggtcggtcgcataggctttatttttgtaccttcagttctgatatatgtttctatatcatttacttactaagtaaaacattagaatttttggatatcatataaaagcaaacttaggttgattacttattactgatggtactgcagggttagcaggacagtaacaaagggacttcttatgcatttaggatgtgatgtaaccacagcaagctcaagtgaagaatgtctgcgtgttgtttctctggaacatgaagtggtcttcatggatgtttgtgcagggttagatggttatgaacttgcaatccgcatacatgaaaagtttactaaacatcaagatagaccactaatagttgctcttactggaaacaccaaaaaggtaacaaaagaaaactgtatgagggttggtatggatggccttatattgaaacctgtttctgttgacaaaatgaggggtgttttatcagaactattggagcgccgagttctgttcgaaactgtttaacctgttagattgttgtatatagctacatcaaatttggagaaacacaaacttatgaaaacatgaggcaattgacattaattttcatcctttttgcttttatgagatcccggcgaaaggaacaacgattgagtctacgttgttaaatcattttttatgaacagaagttcgtatatgttgtatattctgcatttttatagcagtctttcaatgtttttcaatggcggtaaaagtgcatttatactgtcctagattgttttgattaattgatttaagtttaattattttaatattactaaataaattaaattgttgtaaatcaagagagtttaatttaattggttgaacgtagtgtatgaattattataaattttttggtatttgtctatttcttagaagaaaaaaataattaacttgtgggatgcacaagaggatttaggccatgtgtacagtggtagctcctgcaaagactgagttgattttatccatacatgataggaactttcttatttttagttgtttttggcgggaaaagcctttgagttccataggttccacatgtaaggtgtcatggtcgtgtgggtttggatacccaattacttaaagtctagttgttactctaatttacaaatgagttctagtgctgattttactttttaagtttgatactctttagggtggctgtttttagcaggggtaaataggaaaaatccacatgacctttataatataactaatttttttaatcttaatgaattagttaatttaattttataaaagaactggatgcgatatcttttgcttgccttttgaaatctctaatttttcatgaatgcaaataactcaattagagtaactcccatccatatgcatagttatcataattttgtgggacttattatgtcacataaatttaaatactttacgtaaaaaaattactctatggttaagatttttaaagtgaatacttaacataattttgtgattctaccccacgtattaatactttttatattattttatttcaactcaaaatattattttatttgtattataatttaaattaaaataataaatgtaaaaaacataattttattactgtgcttgttcctaacttcgtagacttacataaattgataatcttggcctatattgattgctctaattacggatcatcaccatttttccgtttatgctttattagccaaacgggaagttaca

SEQ ID NO: 323 - DNA, 5791 bp, Glycine max
  source 1..5791: mol_type = genomic DNA
actacataacttgatcctcatgtttgccttcgaattaaagtagtcaatatggtcacattttttttccctcaaatatataaaagttaatctgaagaagatattaattattaccgttagatgtggccggggaaaaaaataaatttattaatataatggtttatgtcaaattaatataacataagtcagagaaaacactgttagaagaaagcgtttcacatcggttaagagacaattttttatgatggttattaatgatcgtcatgtggttatattaaaaggatggaatcaaagggaatagaacaatgcaagctgtaaaagagagaatagaacaagacggaacgttgtgttatgtctgatagaaacctctcacgtttctggcactaaactaattaaaagcacaaatgtgaaataaataggactgaacattacttctaattatatattgttaatgagaagagttgctagatgttgactcttccaaactcttactttcccactataaatggtgtgtcacaaatattggtccaagagcttaggcaccagtaactatttatagactattttttcatcaagaatacattacaagcctttactacaccacaataaaaaaatatattaattaataagaatttttcataaaaaattgcttcttaatatttttaaccagtgtcttaaatgcagtacttgttagcattttaattattctaaaattattcaagtctttacctacaggtctgaagtatatattggaatactattatttcatgatatttatagcaatgttatctaaaagaggaatatattttgctagaaattaagaaatcagaaacaccttctaccttgcgttacattccataaacagaaaagtgctagttaccgtttattacaaggcaatctccagtggctaaaatccatttgctattttggcaaatgcttaaacaagcaacgctcatatgaaagctcaaatgaaggtttattaaacagaagcctaacctaaggaacataaaccagacacacccaagagatctctttgaggtttctcatcaaacacctttagccaacaacaatggcacctttgaacaaagttcttttgctcctcaccttattgttccttgcggtggatgccaaatacaaaaacaagaaagacaagaagaacagtgtttttcataagattcccaaatttccaaaatttccagttcctatcattggaggtgaccagaaagttgttgtggatggtggtaataatgccattgccaagcccgattttgaaacaaacaacctagggcattgggagttgattaataagcagtcgggtgtatccgccatgcaaatcaatttgatgcccaataacaagatgcttgtatatgatgccaccgtttaccgtacctctagactcccatatccaaaagggatgccatgtgttcaatgggttgatgacaaccttaagcaaagcaaagaagattgttttgctcattcaatggaatacgatattgagactaatcaagttcgagcactcacggttagtgtcatctttatttcttcttttcacacattacaaaattaattagcttagtgttgtttaattaaaatgtgatgcatcatactagtagcatgatatactaataatgagtttaatcattatatattgtcaaccaattaaaatcataattgatataacttttaagttaattatcataaaaattaataaatttatcatatttatgattcgataaaaatataaaacacttttttatttgcatcacttcattttcagtcaatttcttttcatatgtttcttttcattttctattgtatcaagtatttatcacttttctccctcctcttttgtttttctctccatctctctcatccttccactcagccaaaaatgaaaggaaacctaatgtttaaccatgatgaagcatttttcttttttgtgacacgctttcaaattaaagggcacgagagttgattaaatgcatggcataatgtggaccttggtgcaggtaaagacagatccatggtgctcatgtggaggacttacacctgatggtaccctagttgttgctggtggttttgcagacggagggaaaacctccagatactatggcggtcaacctgattgccaagactgtgactggagggaataccccaataaattgcaagagcctagatggtacgtagatacagtatttatcactataatgttcatttaaatcttaaatcttgacaaaactgattaaatttaatctaattaacttagctaattaaagttttatttctaatgatttcaatttttgtttggaaactctaaatattccaaggatttggcttgcattttgaaacaccaattatatatagtttgcattattattatttttttcttttgtgtatatgctcgtacatggaaaaactcttaaatacatattatttatcacattatctcacttaggcactggaggcaaataacatgtataaatgcactttacactttaaattcaacattatatttaggtaacgtttcgtgacagataaaatggaatgataaatctttctctattccggtctctttaattccaccttcttcaataaaattatatataccatttttttttacctcatgcatacgttttattttaattttaaggaaaaattattttttgttattataagcgcacaaattttaccttttaatatttacacttacaaacaatcttttctaatccttactaaggagtttaagttagtttgtcgaataggtgtatgagttattgtaaattttttaatatttatctttaattgttatgaataaaaaaaaatttagatcttgtgtaaatattttcaaatcctttttttttgttgatattgttacacaaacattaccttttagtgtttgttattttataatggcaagagaccaaaagtatttgtgcaaaaagtaaaaatgatcatttttaagtttaaagattaaaagggtaaagtatgtgcaattataaggcataattttttctacttttaaaatatatcgaacatatatatatatatatatatataatattttcatccctttttaatatatctacccaatgctaccttggtattaagcaaacggcctacatattagttgtctaattaatcaagaatattagtttcatttcatgtatatgaaaaatagatcatacatatgataataccacaagcataatcatttcacttgagaagatgttagagtattagaccaatatgtctttcctacaaaaaccatgcattattgatttgttgttccactcttgtatatgctaggtatgctactcaagcaattcttgccaatggagagtatattgtgataggaggtcgtagatctttcagctatgagttctttccaaaggaagggcaacctagtgacaaacccatatttttcccattcctctatgaaacctcagacattgatgaaaacaatctttacccttttgtccacctttctagtgatggcaatctcttcatctttgccaacaaccgttccctcctcctcaaccctaccaccaacaaagtggtccgcacctaccccgtcctccccggtggttcccggaactacccggcttccggcatgtcttccatcctccctataaaactcgatggcactgagctaagtagtgcctccatcaaggtagaggtccttgtatgtggtggcaacagccatgatagtttcatcttagccgagactgaaaaaattttcaaaccagccatcaaagattgtagtagaatggtgatcacagaccctgaccctaaatgggacagtgaagagatgccttcagggagaaccatgggggattctcttgtcctccccaatggacaaatcttgttcatcaatggtgcacaaaagggtacagctgcatggtgggatgctgatgaacctaacttcacaccagtattgtatttctctgaaaaacctaagggtcaaaggtttaaggtgttgaaacctagccaaatagctagaatgtaccactcaacctcagcagtgcttcctagtggcaaaatttgggttggtggtagcaacacccatgatacttacaaggacaaggataggtttccaactgagactaggattgaggctttctctcctccttacttggacccaaaactagataaataccgaccccaaattgttgaggaatcttcagagaagaagctgatgtatggaaaaaactttgagacacaattcaaattgcaagacacgaaccagaaattgaccaagcaagacattaaggtctccatgtattttccacctttcaccactcatggctactctatgaaccaaaggttgttgtttcttaagactttcattgctcaaaactctgaagggacttacaaggttacgtccaaggcaccaactttccgagaggtggctcccccaggatattacttgctcttcattgtccatcgtggagttcctagcaagggaatgtgggtgcaaattgggtaggattattactagctcaatttcaaggcacacgtggagatctttgaacatgtttttattttagttttttttaatatctaggaaatcctcatttttgaagcacaaaaaatggaggaagagaaagtggtgttattatcgcacccttttctagtcatgtaaaagttaaatcattttagttcatgtacaaataattagtgtcagcttctacatgagaactatgtcatgtaagggggacttcttcgagtaaagaacatgatgcaaaagatgttttgatgaagtaaagtgaaaaatgataattttactttttaagattattcgttttagcattattgtatacaaggtgatgataagatttgaacttgttacctcatagaaattatccaaactacctaccattagtccaattttagtgagtacattttttcatattaacttgaaagtataattatttttgcattttatatattttcttttgaactagcaaaatatattggtgattaatttagtgtaatagcaacgaaagaataaaaaagaatagatacatagtgggctaatagataatgatgagaaaataaaataaaaatgaaacagattccttattagtcattttaattaacgtatgattatttcattaatttataaactcatttaatcaaaaacaaaaaaattatggcaaacaatattatctcaccatctcttgtggtattttttatatgttgtttgaatttataatttataattttttctcaattttatcctcaatattttaattaaaatctatcttctaatattatactatttattttaatttttattaaaatattttatcattaaataaaaataataagagttcaaaattaactaaaaaattgtaaaaatataattattttaaaacatatatatttttcttaaaaaatagaatttatataaatatataattaattttacgtcaccttatataattattagctaatttaactactaattttaccaaaaatcaactatatatatacgttaattaaggaagttggaagagtgaatatacgtgtgtaagtatatatgtaacaactagtcaactctatttttcatttgcccctctccatcccctttatatatatattcccccttaaattttacatcatataaaaaatattcttttatcttaaagaaagagctagcacaagtagtccaaaaaaaaacattattttcctcgatcaggggtgcacgaccttggtgatgaaccaacaatggtagccggtagctggatagtccattgcactagtcctaggcacgacactcatcatctctttc

SEQ ID NO: 324 - DNA, 7466 bp, Glycine max
  source 1..7466: mol_type = genomic DNA
atcttataattaaaaataaaaaataattttaattaatattataataattttaatgtaaaattatttgtatcatgtttacatgaatgtttggtttcgcgttcaatcacacgcataaaaaaaactcaaaaaatcaaaactatttagtagatcctcttctttgataatagagttttaaaaagatatcacatgaaatcaaatatattatacaattaaaaggataataaattttaatgaggtcattactaaatatttaaatttgtgcattcattcattacttatcaacttattatacatatatttatttattatatttatgaattttaatttttaaacataaaatattagattagaatcacgtaacaaaatataaggaggtatttgggttgactgttttctgctttttatatattagatcagaaaatgtgtttggttgaatttttgaaaatatttttaaacaaatttaaaaatacacttccttttaaaaatgtattttctgtatttttattttttaaaaatagaaaacaagaaatcaaatcaaatatgttttaagaattctaatattttaaaaataaaaatataaaccaatcgcaccctacaaatttttgaaagcaatgacggcttacatgttaacattcatgcctttgttaattgatatcacaataaaaaaattctttgaaaatattcaagagatatgatacatatataataatttatataatattatttatatgtttattttcttatcatattatttattatattttaatttttttactttttttttattttatctctttttattgtaagattgattacaagtataatttctctaacacaaaaataagtaaaatatcttagtaatgaatgtttttagaatattaattaagaagtcaaaagaataaatatttaataaaattatttttgttttaatctaagcggagggattaataaaaacaaaaaaattagctaagcagtagaagtcatcgtataccaaccatctgggagaagaaaacaaaaacatgattttttgcgccttggtccgcaatgtatcgatgatgttgtgtccccatcacaagttgattgtcagaataaaaacattaaattcatccaacattgggaagaagaaataactgagcagcaaagaaagcgagtaatcttttccgtgagatcggtgtgtgaattgtatattcccatttcaatgcagagatccggttatgggtccgacggaatatacaggtcactcagaccttccatcgtttttcccaaaaactcaaacctctcactcgtttcccatcttttcaacagagtcgcagcctttccatcaaaaccagctcttatcgatgcagactcttcagaaacactttctttcgcggaactcaaattgctaactgttagggtcgctcacggcctccttcgtctcggagtgaccaaaaacgacgtcgttctcttcctcgctcccaacgacatccgctacatcgtctgcttcctcgccgtcgcctctctcggcgctgccgtcaccaccgtcaaccccgcctacaccgccgccgaagtctccaaacaggccaacgactccaaacccaaacttttggtaaccgtcgccgaattgtgggacaaactcgaacacctcaaactccccgcggtcttcctacgttgttccaacgctccccacgcgccatccagcgcgactagcttcgacgcgctggttcaactcgccgggtcggtgaccgagtttcccgaaattaaaattaaacagagtgacactgcggcactgttgtattcttcgggtaccaccggcttgagcaagggcgtggttctcacgcacgggaacttcgtcgcggcgtcgttgatgattggcttcgacgatgatttggcaggggtgttgcatagcgtgttcctctgcgttttgcctatgtttcatgtttttggtttgatggtcatttcgtacggacagcttcagaggggtagtgcggttgtgtctctcaagaagtttgagtttgaattggttctgaagaccattgagaagtttaaggtgacgcatttgtgggttgtgcctccgattattcttgctctcgcgaaacacggtttggttgataagtatgatctttcgtctctcaagcatattggttctggcgctgctcctcttgggaaagagttgatgaaggagtgtgctaaacgttttcctcatgccattgtttctcaggtagtagacaatgtttgtggttgattagtgaggttttgattatagctattagctaaggcctaaggacttgtttggataaacttacgtgtaattacttgtagaaaaagaaaataacaagctaaaatgcattgagttcttatgaagttgattttaactaactgaagaagctcaatttattttattatgaacaagtttattcaatcagggcctaatgctttcaagttgaactatgatttttgtgttggttgttgtggtttcagggatatggtatgactgaaacttgtggaattgtttctgtggagaatgcaaggatgggaattcggaatagtggctctacgggaatgcttgtcgccggaatggaggctcaagtagttagtgtggatactctgaagcctctccctcctggacagttgggggagatatgggtacggggccctaatatgatgcaaggtacactgcatatgcacttcactgtagtgttcttttattatattgtttgattcctgtggtagttagtgattaagaaaagatgtatgttgtctgatgtggagggagaggttgtggtaacccttcattgaatgaaaattcagaggccagagtaattgtctcattttattgcatttgaaggttagatcattagtagtggaacttattccttaggctggacatgttatgtacatctggtttaatactgtgcttgaatctgcatgttctgcttttaggtgattcagcttgactaggtttagtctcagcagtatgtatacaactatacatttccctggctctttcttgtctataaaacactgatttattttaagtttggtggcacttgatattggcttgtagggataaatttggaagcagcatggattagaacaaaattagctctgtcataaccttaaacatgttagttgtatatgataacagaaaaaaggacatggtctggattctaaaatgtacattaagctgtttgccaacagactaccatcggttagtgttcttgttaggcttcacgaacatatcttttactttctcttccaaagaaactggtccacctagagataataattgagttggagctccattctctaaaagatactccctgcttcatgcatggaaaataattttttctgatgtcaaattgcatctgatcactaatttgtatgagtaattctaaactgtggtgtgagcatcattgtggtttgagtcttgaagttttcttctgattttctaactgggattgtacttcaggctctttgtttcacccagtgtttttcatttggatgtggatgttcaatatattttatgcgtgatattagataattcattattgataatggcagatttgtgctgaattacaagtgtgaactgcttcatagaatgttgccaacagaaactgtttctctttgggtgaaaagttatccagagaattggaaaatagtcctgcttagtgctttggctgcttccttcacgtttctgatcgttgcatttcctacttccttatattaggcacatttccactatttccagactgcggctttgatttcttcttctcaagatggttgtctctcttggttcgtttccctcggactattaaatcttcaccactcacagaaaccttttgcttatttctttcattcaatacctttgagttcagggctgattgaacctctaccagggacaaagattctctctcacacaagagagtttctttaaaatgagagaaagactttggtaaagcacacaatagtaacagggcctgatcttcatcatcaatagtcacatctatattttctagatcaagaatcagtttattgaagacatccagttgagattccacagttcagtcttcttgcatcttgaattaatataagacttgtttaagataaagacgatttaccagaggtttgatcatgtacaaaccttccagtttcgaccaaattccagctattgtcttctccttcgagacctgtcttagtaccttgtctccaagactcaagatgattgcactgtgagtcttatccatcaagatcttcttatccctttcctccagctttgcatcaagagcggtttcaccttgcaaagcttcttcaagaccctgatgaacaagcaatgctctcatcttcaatcgccattagccaaaatcatttgggcctatgaattttttaacctcatactttgcagatgccatgatttttcgttccacgctcaccgcaccaatttgttgtgaattttgagagaggagaatatgaagatcagagcaatgatggataaggcacgcagatctagttacgagccaacactacaacactgtttctttattgatgaatataaatccacattacaatcttgaaacaatctgtacaatgtaaagtctatttatagacaactagacttaactaacatttctaagaatagtaaacagttaatctgttagaaacagaattgaacaggtcagcataactgactggaccaaaacctccatgatgcttccatgttcttgtcttgaaaaagtgctgatatacgttatatgtgcgtatagtcagcaccggatgtactcattaattgagtgattcttttcttggagtatttggttattgccatagtagagccggtatacagagcatacaaagggccatgaatttaatttagtttgaaaaagataaaagctaagttattacttgaattagatttctgctgtgatgtatagaaatgtgggccaatgtttttatatgtcttttttttgtgatactgtgcatagggtctttagtttacttcgtatgcagtttggctttaaatattattccatagggtcttttcctatatgcaatttaataaaagttattacataaattttcaggttatcacaacaatccacaagccacaagattgactatggataaaaaagggtgggtacatacaggagatcttggatattttgatgaggatgggcaactttttgttgttgaccgaatcaaagaactgatcaagtataaaggttttcaggtatgaaatccaactgccatttcaagagtgaatgacaatttgtcgggcatgtcataaatgcatgcatggtcacatgtctgaattctcaatcaaatttttgaaagataatctggtactttggtgcattaaatatatcttaaaccccaaattgtattagaaagtcaagtttattaacttcggtgcataatgcttttgcttctctgcattgtttatttacgtgtgtttataaccttccagttattcttggtgatgaacatttttggcgaaggattttcaccgtactgaattattttctgtttccctcattgttccaactaggttgcgccggcagaacttgaagggcttctggtttctcatgctgaaatacttgatgctgttgtcatcccgtaagtttcacatacatgatcatcgttatttaatatgggtacagaagaaatacttatacaactcatgttattagtaattgaaattcatagttgacttcaattctgtagatatcctgatgctgaagctggtgaggttccagttgcctatgtcgttcgttcacccaatagttcactcacagaggaagatgttcaaaaatttattgctaagcaggtaagagaaaaataaacaatgagcttggtctgacttgcattcttggaattataagatctttggcttgtgaagaaacgaagcaaactaaatggggttctaaaaataaagtttagacattaaaaaaatgcatgttttcactgcaggtccattgatcacaattaaacgactttttgtgttgtttttgttgacactcattttttgtatttgtttgcaggtagcgcctttcaaaagaataagaagagtgacattcatcaatgctgttcctaagacagcatcaggaaaaattctccgaagagagcttattgagaaagtaagatccaaaatatgatgatatcatggtgtaatttttttgtgtgttttcaaaaccatttcggggtttaaattcagaagtagaatgcaagtccagagcgaatccggaaaggtatgatggttgtcatagtggatcaaatatgtatctggctgggaacagtacttactgttgggtctagcatatttcaatccattttataaatgggtcaattcattctagttcacttaaggttgaatctttaaaaaaatggtctgatgtgacctaccatggattggtgagataaacaggttgacccatcaatttacctagaattatttttttacttaaaaaaattcaacaaaaagttaatttttagaaaaataaaattttgaatagattagaaaatattaattaaattaaatctttaaccaaaatactagtaaataaaatttaattctaaaactttaaagtcttaaaataatattataaaatactaagtatattttggaggtgggttaggaagatcaactattcccatcacggttcaatgggcggaatcaaattcttcaaccaattgcaaagtatgtatcttttttgggcttgaccagacccaaaacctataatggatcagattaacatgtggatttgaatttgttttgaagtatcatatccggccatatcttatataaagtttagttacaccgccttctctgtatggcggtttgattttctagaatgtgcattttgtgtgctatagtgagctaaatagtactagtagttattatagttgctaggcgtaacttttagaaagttttgtagaaattgtgcagaattctagatgacacatgttactgggttctgtatgcagaggtccaatttcaaccccaccccccaactgaagctttactgcagttgctttatataaatgttatgagtgttcttagctcgtcgagccaaaagaattaggcaatatagtcttgtttcatgcgtaagcctgtttaaattaatagtgtgtttgtttgtgagaatcacatccaattttcaccaaggccgaagttactttgtattgtttcagattttcacatcttggatcctcgtttttgggtttggacacagatctaaacgtacacctactcatacatgtaaattggattgtcatatcatatcagttgaattagtagggcataattaatatactccgatccctcagaagtttatctcttttatcggtcttttagggagagggtattgggtgggagtgaatggggtttgagaagaagacaaaagaatagattccaaaactggaataatctcgaaaatgagatagagcttgatcaagttaattgaccacatgtgggtttaaattcgtcggct

SEQ ID NO: 325 - DNA, 4481 bp, Glycine max
  source 1..4481: mol_type = genomic DNA
taaagctacaataatgtcatttcatttattaaagttgcatttgttacattaaaataaatgctttttccattgatagcattagtgtgcaaagtgaattttgattagtattttttccctctaaaaaaaagattagtattttgttgagattaactattcacaacataagaatttatacaactaacagtaatatatttcttaagttataaaaattactttctttctaaataaataaagttttattttattatccaacaagtacttgagatctgaagatcgatcacgtcttttagaagggtggagcataaatacggctatccacttgacttgatataactactgattttgacaaggattgttcttcacttgcaaaaagattggatgaaattatattagagcatgttaaatggatattttgatttagtctttactactcttgcaaaacaacacatcagaaagtatatataaacagcagagcatgtgcatgtgaaaaagagcaaagaaaacataggacatattatgtaccaagaaataataatgagtaaagggacattaaccggaattaattttcaaagtcaaatataaattatagagtattaaacatagcatttccctatggtttgtaccaacttccttccaagtggctaatgtaatggtgaaggcataattcttgaatccgtggaatgattactaggattaagaaagaagagaaaaagaggcgcgtgagggaagaggtgattgtagaaaaggtggagcccaggatcattctgggtccccaagactctcaatcgatgaagcgtacgggcacctgattttctagtgtatggtgtctgctctatgcacgagctgtactctatcatgggcatctttcttcggattacggtgtggccacggctcttctctttcatgcccctgcccctgccccggaccttcattcttttaaaactaaaataacgtacacatgattaaattttttaaataactcactcactacaagtaaaaatatcacactcaacatccacacttttcacataaaggaaaaaagaaaaagaaataaagaattcgttccattattatggcctcccttgttccttatcttttccaatttccacccttctttctttctctctctccgtttcccctttagacctctctctcacttgaaactccacaaccccattttcctttcctatgaccctattccaaatcaccaattctaattccattcttcaggtgttcaattgaattcgtgatgaagagggatcaccgagatagctgcggcggcggcggcggagggagtgtgaagggtgagtgttcctcaatgccgtcgaacgggaaggcaaatatgtgggaggaacaacaacaacaacaacaggggatggacgagttgctggcggcgttggggtacaaggttcgtgcttccgacatggccgacgtggcacagaagctggagcagttggagatggtcatgggttgtgcccaggaagagggaatttcccacctcgcctccgacaccgtccactacgatcccacggatctttattcctgggtccaaaccatgttaaccgaactcaaccctgaacccaacaacaacaacaatagcctcctcggtccatcttctctcttaatcgacaacaacaccgcccctgttttcaacgacgattccgaatatgacctcagagccattcctggtattgcagcctaccctcctcctcctccacaagacaacaacaacaacaacaacaacctcgacgaaatcgaaacagctaacaacatcaacaagcgtctcaagccatctccagttgaatcagcagactccgcgtctgagcccacgcgcacggtgctgctcgttgaccatcaggaagccggcgtgcgtctggtccacactctcctggcgtgcgcggaggccgtccagcaggagaatctgaagctggccgacgcgctcgtcaagcacgtgggcatactcgcggcttctcaagccggcgccatgaggaaggtggcttcctacttcgcccaagccctcgcgcgtcgtatctacggaatcttcccggaagaaaccctcgactcctccttctccgacgttctccacatgcacttctacgagtcctgcccttacctcaaattcgcgcacttcaccgcgaatcaggctatcctcgaagcatttgccactgctgggagagtccacgtcatcgatttcggcctcagacaagggatgcagtggcctgcactcatgcaagcccttgcattgcggcccggcgggcccccgactttccgtctaaccggaatcggcccgccgcagcccgacaacaccgacgcgctgcagcaagtgggctggaaattagcccaattggcccagaacatcggcgtccagttcgaattccgcggcttcgtttgcaacagcctcgcggatctcgacccgaaaatgctcgagatccgacccggagaagccgtcgctgtcaactcggttttcgagctccatcgtatgctggcccgccccggatccgtcgacaaggtcttggacactgttaagaaaatcaagccgaagattgtcaccatcgtggaacaagaagcgaaccacaacggaccgggttttcttgaccggttcactgaggccttgcattactactccagcctattcgactcgctggagggttcgtcctcttcgaccgggttgggctcaccaaatcaggatctgttaatgtccgagttgtacctggggagacaaatatgcaacgtggtggctaacgagggcgcggaccgggtagagcgtcacgagactttgagtcagtggagggggagattggactcggccgggttcgacccggttcatctcgggtccaacgcgttcaagcaagcgagtatgctacttgctctattcgcaggcggtgacggctatagggttgaggagaataacggctgcctcatgcttggctggcacactcggccactcatcgctacctccgcctggaagcttccctccccgaacgacttgcactgtaaactgtagattaattggctcctggatgggtggtaaataataaaaaatggtttggttgaacttgttcgagtggagtgaatcaatgacccagtgagtcagtgagtcagtgagcgagccagcgaggcagcaagaggataaataaatgagagggtaaaaaaacaaaaaagtaaaaaagaaaaacaaaagactgtaatttgtaattgtgctctcgtaattaccgtttctcctctttagtgtttttttttcctttctctaaattattatataatttgtttaattcttaattatgatgtctttttctttttaatctttatcttaatcatgtgttgtgacttgtgagattgattaacttgaattaactggttcaccgttgttggagggggagggtctggtcctgtcgaggaaattgattgtgtttctagcttttgttgtctgagtttttaataaatgaatgaaagaggtggtgtaattttagtcttgtcaaaactttttgttaatacgttgtttcttttgatgaataagaaagaaaccttgcatttcgctgtgttttctgtgattttaattgttcctcttcagtgaatgatttctatgaatgcgatcatttgtggataaagggggaagatgaaagcattttgatttggaaaatgaaagtgatgggatgattattctttgggtattaatttctatgtatgagaatttttgttttgcgtttattttcatttttccttttagagcacatgataagaccatatgatcgaaaatattcggaatttttttctgccaacactgaatttccatccaatgtacccgaaaagaaaatttcattcaagagttttacctaacggattttattgtaagtaaatttgcacgccacttaggtgaagtcaaatgattgttatgatccaaatgctttgattgaaagtaacatagaaaagcaatgtaaattatttaaggttaattttaatttccaatctcagtccatgaagttcacatattcaagcctaaaaagatattctaatcaatgccataaagacaggctgctcttgttattcttttaaatattttacctgtttcatctattgtaaaaggtattgagaattcaccacatgaccctaattatggatagtcatccttattttaaccgggttatatgcggaaagaagcaaatgtataagtcttctgagaaagaaaaaaaaaaatctacagccactaagagggcctcatgtctcaagtgtatccaaagagggtttttcaatcgctacgattaccttttaggttgagtaaaatcactagtttcctgtaatatgaaaataaagttcgattttatgttgagaaaagcacctaaatttactttttatgttattaacatgatggtctccgaggtatgcaaatcatcttcggttcagagcaaaagtaaattttcatttcttagattaaaagaaatggatacctacattttgttatggacgtacgtaaaagtgattta

SEQ ID NO: 326 - DNA, 17432 bp, Glycine max
  source 1..17432: mol_type = genomic DNA
ccataatttattgaaatgctatctctgcttatatgcgtcaatataaacaaataaaaataaagtcctaacggagtaaccctagttacaattttatccatacaaagaatgacaatgacaacctctttttttttttttcttctttttgacagaagtagtgcaagaaattatttcttatattatcgtatatgttattaaacagtgctaatctttttccatcaccatctttcgttatttatacactactaatgaccattaaaatattaaatttatagtttggtagaaaaaaaaatagacaaatgtaaattcgtctcatttgaaggcaaacacgtgcaataaacgtactaaatgttattttttaatctgagtttagtttttaatatattatgtaaattaacaatcgttttaaatctaattaaaaataattattataaaatgataatttacaattagataattagatgaccgaatacagtacattttaattgatttttcttatttggtaaatgtagtcatatggtattcattaagatagaaattggatgcaatttctcatattttctttatgctaatattatttaattaaaatcagagtttcaccttggaaactttgctcatatttagttaatataaatattaaaaaagagaaaataaattatgtattacaaatataaaataattttatatcatcatttaattacaacttatcatatataataaatttattaatttttatgataattacttcaaaaatcatataaataatgatttgtgattaaataaagaaaataatttttttaataaataagaaaaagaaaaaaatgaaaggaaatttttgtagccttaaaaaatggattgttatttattaattataactcgaattaacatgatgatatctggatgtggaaacagacagttttaaataaaataatagtaaaaagggatacaagtaggagatggtggctgctgtgtttgtttgtttgatgaaataggaggaagcatcgcttcccatatttgactcatctactactgattataaggaagaagggttggtggacaaacatcaccacccaacaaaacaaaacaaaacaacgcatagtcaatagaggcaccttattctacatgcttatatgtatgttattgttatgtgatgcattgatgacgtgacatgctcctcctcctcctaccttagccaaaccccccaaattctttgaaccatttttactactacaactacaagtaatttattcattctcaccacccactaagagagagagagtgaaaggggtagctgggaactactacttactacttctaccgagagaggtgtggcagaagcaggtaccacgtgcagctttcattgaagaaagagagtgatccaacactccaacaggtcccaacccaataccaacaccaaacctacctcactcaccccatccatcaaacccttttggtttggttttttgcatgatcatcatcactgattgatcatcaccatttacatggactaacccaacaactcacctctcaattataattcaccttcttaggctcccaatgcttctccaactcccaccaatttgctagaataaaattcaaaacaacaaaaacagattcttgatttcgtccccacagctttcttcccaaggtctgtgcttgtttgtgactgtttctcctccttattctatctgtgttcctttgtttgattcattctcttatcttcatttttgtatttttattttattttttacaaccccttttactgaaatgttcaaaaggtagctgagttctatgttgttcgtgagtttaaggaaaagtctttgatgcccttttgtttagaattggttttggtgtggaggctccgatagaaaaaaatgtctttttggctaaatcggaagttagaggggctaattgattgaaaaggtagcgtgttataatgagatgctgaccttttttgtttttgtaattgatgttttcgccataccgaaactaagagtgagagagagtgaactgctaggctgtgtttgtctgtttgtatcttacagtgaaaactgcaggcttgggaggaatgggtttgtaatagaattttacgggtgaaatcctgatttgccaaaatgagttaaccatttgtggttgaccaaatctggagttacttatcaagtccatatgtggttggccaaacagaacttaacaacttttttttatctgtctattttcttttacttcatgtcaatcttgccagtaaaagtttagatggattttgtactgcttaattatatgctttatcttgagtttcgtctatatataataattaataagctgaacaaatgattcttcaaaaagtttccagaattccgttactgaacaagcaatataaattgaaaaaagaatcctaattcctaattgattctcatatgtcttgagctgctggtaatctattttttattgtgctgtacataggagacttattgaaggagcgcaataatggctgacattgggcgtaggaatggatatgcaaacagtgtactaccaaataggccacctgctgcaatatctgaagtagatgaattctgcaatgcccttggtggaaacaggccaattcatagtatattaattgcaaataatggaatggcagcagtcaagtttatacgtagtgttaggagctgggcctatgagacatttggctcagagaaagccatcttgttggttgccatggctactccagaggacatgagaatcaatgcagaacatatcagaatagctgatcaatttgtggaagtacctggtgggaccaataacaataactatgccaacgtgcagcttattcttgaggtgtgatctgttgactttatgagattttatacttcaagtaattgtgatagcagtttttgttaagcaaagttgaaagcgacaaagtatggatggaaattatacctggaaatgttcatttatatttttctgcttgttataaatgttcatcgagaagaaacataacgctatccccctcccatgacatgaaatattcattcgataaaaaaatgtattgcataatttgttcctgttgccaaatatcttttttgtttcctatagttcaattcagtttgttcttgtcattgtagattttagtgcttatgtagtaatgattcttttgacctatataacttatataatctgcttactggcatgcaatgtactgcccagatggctgagataactcatgttgatgcggtgtggcctggttggggtcatgcatcagaaaatcctgagcttccagatgcattaaaagcaaaaggaattgtatttcttggacctcctgctatatctatggctgcattgggggataaaattggttcatcattgattgctcaagcagcggaagtgcctacccttccatggagtggttctcatgtaaatttccatctcccattttagtgcctttcttttttaagggataccagctcatgacgttgaagtttcttcttacaggtgaaaattccgcctgaaagttccttgattactattcctgatgaaatttatcgggaagcatgtgtttatacaacagaggaagcagtggcaagttgtcaagttgtaggataccctgcaatgatcaaggcatcttggggtggtggtggtaaaggaataagaaaggtttgcttcttgcataatcaatactgtagcatttagaaaatcctatagcattcatgctgttaatcttgtaagctaattttgtcttccatgagtatgttaattgttttcaaattgaaaactgcataaatacctataagaacaagaaactttgtgccaatcttattttggtatgatttgtttggcaaagtttagaaactaataggcatatggattttttaggttcataatgatgatgaggtaagggcattgttcaagcaagttcaaggtgaagttccgggttcacccatatttataatgaaggttgcatcccaggttagataatccactgatctatgatctgaatgaacatgattcttggagtcatggtcgtattctgattatctattttgtttctaagtagagccgacatctagaagtccagttactttgtgatcagtacggaaatgtcgcagctttgcatagccgtgattgcagtgttcaaaggaggcaccaaaaggtacaaaaacattttgttgccacaccaaatttccatggtgaaatgagtctcatgaatgacctaatcaattgtctgtaacagattattgaggaggggcccattactgtagcacccatagaaacagtgaaaaaactggaacaggccgctagaaggttggctatatctgtaaattatgttggggcggctactgttgagtatctttatagtatggaaactggcgagtactactttttagagttgaaccctcggctacaggtaactactgttgactagatcggttctatctttattgtatgttataaccttggttttgacctacatcacaattattttgttatctcttgtaacttattctccttttgacttttgttctccatttgattatgatcaatatgccagtattttattctaaaacggacatggaagtgagtattgcgtttttatgataacacttagaatttttatggtaacaggcatttgagcctagtaattatgtttgggaaatgcttctgtatatttttggagattttgtatggatggtggtggtgcttgaaatcagctcttcccgttttccagaccctgttttgtttttttatgttatttcatttttcctttatttttgacaacatcagtgattgttttgctatattgattgttatataggttgaacatcctgttactgagtggatagcagagataaatctgccagcagcacaagttgccattgggatgggtgttcctctctggcaaattcctggtactacttcagatatactctttatgctaaattgttcacttgattcctataattgtccccattttaagttttagtccctgtacaaggaagttgtaagttttagtccctacacatgcataaaagtttaagttttggccattgttgctaacattggagaattttttggcagtgtgaaactgctacaaaaacttccttacagtgataaatcgccacaaaaattaaaatgtgggcaactgtagggaccaaatgaatagtgtaacctattctttactattatttactttcttcttgtttgctatttgatttgatttcttacatgtatttcatgtgtctcatttaatagagataaggcgtttctatggggtggaacatggtggagggtatgatgcttggagaaaaacatccgttttagctaccccttttgattttgacaaagcacaatctacaaggccaaaaggtcattgtgtggctgtgcgagtaactagtgaggaccctgatgatggttttaagcctacaagtggcaaagtgcaggttaactacaagtccaacagcaatatcatcttttacttcattcatccagtaacttgtactgagttcaagtatttgtgcaggagcttaactttaaaagcaagccaaatgtgtgggcgtacttctctgtcaaggtaagtcttctgttcttcaatgcaggcatagattaaatgttggggtgctaaatttttttggactatttgcagtctggaggaggaattcatgaattctcagattcacagtttggtaagtagtaactattaattaattaaacaaataatattgattttcaaatgctcaatatatcattttgatcttcaattgggaaattgcagattccataatatcatgttgatattgttggaatatccacaatgcctgcctcaattcctgggtgcaacttatatatctgttggaaagttcacttaatgccacttggttttaaggtggaatttaacatggtactagagcctatagcccatcattgtgaataacctattccggtaggcatcacctattctggcaggcatttatggaggggggtgttagaaagtcctacatcgcctgtctcaattcttggggtgcaacttatatactagttggacaacttcactaattggttttaagatggaagctaatgtgtataggtcttttttttcagttttacctagtgcatattctttcagtgcataatgagcaatacatcttgccttgggcaatatgattaatgtttgcaagagctaggatgtacagttgggtttggtgggaggttgcaaaaacggaaatttaaatgcattagtcaataggatttttttaatgaatatgagatatagtaaatacaggtactagttgatttgcatggatatgtgtgcatgtgcatttgcttgtgtatgtaaaattgttcttcataggtttccacacatttaaagcagctgcattgttgataatagtgatcaataatttttcctcttgtgacaatgatttcttaacatgcaatggctgtgtaattgacaattcatattcattgcctttttatgttggttgtcatacttataactgtaatagtggtattaaatggactatgtatctccagtaggtatataaggtgtaacagcatttgatgtatttactcgtaattgtacaactttcttttcctgtgttatatagggatctttctctctatgaataaaacaaaaagaaacatattgagtggcgttgtataaattgtgggggtggagaaggaaaaaggttatgggaatggagaggagtcttttagatcacaggagctagggaatagggatgattattattgtgactagggagaaaaaaaagcaaaatatcatgtccactcaaggatttcccagaattagtgagagcttctgataatgatttagaaatattgattcttgtgttaagtaatttatataacaaacttcactattggggaatttttaactgtagggtatcaattctccgtaacattctttcttgtccttatattcatgtatttacacaattcccttacgataactcaccttatattagctttaatatcgtatctttttacctcagggcatgtttttgcttttggagaatctagggctttagcaattgcaaatatggttctggggctgaaggagattcagattcggggagaaatccgtaccaatgttgattacaccattgatcttctgaatgtaaattactcacatggtgacaaattattttataaaagttgtttaacatgctgaattgacattaccacaatattttatctcaggcttcagactacagagaaaacaaaattcacacaggttggctggacagtagaattgcaatgcgggttagagcagaaaggcctgcctggtatctttcggtcgttggaggggcactctatgtaagcaacttgttttttatattcttttctcttggacttttgctagtttcatatggtggaattcatgacctgcgcttcttccaattaatacagaaagcttctgctagcagtgcagctttggtttcagattatgttggttatcttgaaaagggacaaatccctcccaaggtatcgtgtctaaatgggaagaccatatagttctactatgcatttgaaccttattgtctagtgattctaatttagtttataattatgacagcacatatctcttgtccattctcaagtgtccttgaacattgaaggaagcaaatatacggtatttattcttacaaattttaatttgatgggcactttctgttgtctccttacctttgttgagacttatgctgccatcattggcaataatcaatttgtgtaattcatgtcttgtaaaactatttctagattgacatgatacgaggtgggtctggaagttatagattgagaatgaatcaatcagagatagaagcagaaatacatactttacgtgatggaggtttgctaatgcaggcaagtatttgttctctaaacaacctatgtgtgtttttttattttgtagttttgcccataacagtactattcatcatagtcaacattatgcttatctaaaaaaaaaaaaaaaaatcatagtcaacattatggcattccatggtttgtgaacattttgcgttactatttcattcatcattagattctctgttatagacataaactatttctgttctgacttctaaaattttactatcatgattaaatcgtttagcataaactgtttttggatgtattgtgcttctccatctgagaaaatgttatgcatgaaaagtacttcctgtttctagagatgttcaaactttttttgtgccaaaccttggaaaggaatgtgggtatttcagtacagatgatttatgcattatttaatgattccatcattttatcacagttcagactctgatcaaaccatatatggagagagatttattaaagcatttgataattctttagtatggatagtctgtggttggtcagtctagatagaaatgatgtgtgcctaaagtgcatctttttaattcatgctagttataaacttgaatattattgtgctgcatctataactttattccaatttagctaacacagtggtattttatcgataacatcactattttataactggtctgttgttctatatctgattcttgagttattaactagcagttgccaattgttacagttggatggaaacagtcatgtaatatatgcagaggaagaagcagctggaactcgccttctaatagatggaaggacttgcttgcttcaggtgaaatgagttcagttttaccttaactatttcttttgtggctgaggtaagtttctaaacctctctttttttttttatgcagaatgatcatgatccatcaaagttggttgcggagacaccatgcaagcttctgagatatttggttgcagatgacagtcatgttgatgctgacacaccatatgctgaagttgaggtcatgaaaatgtgcatgcctcttctttcgcctgcttctgggattattcatttcaaaatgtctgaaggtcaagcaatgcaggtatatagcattctattccacattggaagtacaggtgttcatattgaaagagataataaaatagtatcactgtttgcaggctggtgaacttatagcaaggcttgatctggatgatccttcagctgtaagaaaggcagaacccttcactgggagcttcccagttctgggacctcctactgcaatttctggtaaagttcatcagaaatgcgctgcaagcttaaatgccgcacggatgattctctctgggtatgagcacaatattgatgaagtgagtaaattcttcgccttggttcattaacattgtaattttacagcattcgtaagtggttgagtcatccgttattgataggagatttttggtttctattattattattattatgagacaatatgcttgccttattaacaagatatacaactatctcaggttgtgcaaagtttgcttaattgccttgatagtcctgaattgcctttccttcaatggcaagagtgcttggcagttcttgcaacccgtcttcccaaagagctaaaaaatgaggtaaagggataccctgccacctttttttctctggtttaatatcttaaaagtaatctgagctggtgttgaactatgtggtttttcagttggaatcaaaatataaggagtttgaggggatttcaagctcccaaattgttgatttccctgccaaattattgaagggaattattgaagtgagttgctttccctgaatttctcattctggtcttttcccttctaatgttaataatttatggggcatgttttacactgcaggctcatctttcctcctgtcccgacaaagaaaaaggagctcaagaaagactagttgaacctctattgagtcttgttaagtcttatgagggtggaagagagagccatgcccatataattgttcaatccctatttgatgagtatctttctgttgaagaattatttagcgataatattcaggttattatgattattcaactgcttgtactaatattatgtgggtaaatctgttatgaccttttatgatttctaccctccaaagtagttttttaatgggtgatgttaaaacttacaagaatctttgatacattgattttctgcattactatttctggtttttacaagattctgatagatcattatatattttttctttctctaaatcaaatgatttctttattgtcttggggtggtgtatataaaaactgatcaacacattttagttttctttttttgcctgttcattccaatgtacaaatgattggtttatgatgcaacaaaatctaaatcaggaactaaatagctcttttaatataaaagatgttttctttatcttttagttttctagaatattcatgtccctttcccttgatgtctaggctgatgtgattgaacgtctgcgtctacaatacaagaaagatctattgaagattgttgatatagtgctctctcatcaggtatgaaattttataacatgttctgttgggtgttttgcttcctggatatcttgttgacattatactgcaattagattaactgcattttgtgattttcagggaatcaagagtaaaaataagctgatcttgcaactgatggataaattggtttaccctaaccctgttgcctatagggatcagttaatccgtttctctttactcaaccatacaaattattctgaggttggacattaccctgagaaattgagttccaagttatattttttggacataccatttcttctactgggagagcattgtgaatatatatccttcaattatctacttttggtttcatcttgtggatgatacttttacatctttggaacattttgagtgaaatcctgatttaaaattttcttgatgcagttggctctaaaggcaagtcaactgctggaacaaactaaattaagtgaacttcgatccaacattgctagaagtctttccgaattagagatgttcacagaggatggtgaaaatattgatacacccaagaggaagagtgccattaatgaccgaatggaggaccttgtgagtgctccttttgcagttgaagatgctctcgtgggtttatttgatcacagtgatcacacccttcagaggagggttgtggaaagttatatacgtaggctctatcaggtatatcagttttatggccagttcatacttttttccaactgtgttttatttttccttgggaggtggtgatggaaggggattatcacgtacttttctaacttctaatattctctatcagccatatcttgtcaaagggagtgccaggatgcaatggcacagatctggtcttattgctacatgggagttctatgatgagtacattgaaaggaagaatggggttgaagaccaaagtttgagtaaaacagtggaggagaaacatagtgagaaaaagtggggagtgatggttataattaaatctcttcaatttttgcctgcaattatcactgctgcattgagggaggcaaccaacaaccctcacgaagcacttacaagtggttctgtggaaccagttaactatggtaatatgatgcatattggattagtgggcatcaacaaccagatgagtttactgcaagacaggtaaagtttcagtaactcctcatattagtttgaactttttttccccaaattgtggaagaactgatggcttaatagcttacattttatttgagatttatagagtagttctagtcttttagctattggttagatgatttaggatcaatatgggaccaataaaattaaaaaatttgttttctagaagaaaactaagtgtccggtgactaatatgctttttgtcgagctactgatctgaacctccttcctcttcttgacaagcaatctttggtgttttgcagtggtgatgaggatcaagctcaagaaagaatcaataagttagctaaaatactcaaagagcaggaagtaggctccaccatacgagctgcaggtgtcggtgtaatcagctgtatcatacaaagggatgaagggcgtgccccaatgaggcactcctttcactggtcagaagaaaagctttactatgcggaggaacctctgttgcgtcatctggaacctccgctatccatttatcttgaattggtaagttatttttttcaagtccctttactttatcaagtggaaaaagcaaattccatttatatgcttgatcttaaactcaaacatttgtctgattataggacaaacttaaagcctatgagaatatacggtatactccatctcgagatcgtcaatggcacctctacacagttgtggatcacaagccacaaccaattcaaagaatgtttcttcgaacacttgtaagacagccgacaacaaatgaaggattttcttcatatcaaaggctggatgcagaaacatctcgtacccaattggccatgtcctttacttcaaggagcatttttaggtctttgatggctgcaatggaggagttggaacttaatgcacacaatgtcaatatcaaatctgaacatgctcatatgtacctatatatcatacgcgaacaacaaatagatgatcttgtgccctatcccaagtaattatggctacaaatttgtccatatatattcttttagcatatgaccaagaagcatttgtatttgtcttacattttggatgttaattccaggagaattaacatagaagctgggaaagaagaaataacagttgaggcagtcttggaagaactggcacgggaaatccattcatctgttggtgtaagaatgcatagattaggggttgttgtgtgggaaatcaagctctggatggcagcctgtggacaggcaaatggtgcttggagggtcattgtaaacaatgtgactggtcatacatgcactgtacatgtaagtctttatttacttggaaatttcaaggaaatcttttctgcatgccacaacttttccattcagctttctaaaaggtttcttttgacaagaaaagtaggtgtgagacccttataagcatcaacaataaacacttctggggaaaactctttgtctaagaaacagaagattggttatgctaataattaggaaggagcatttttctatatatttgatagagaaatgctaatctgcatcaagtgcaaataccatactccatacctttaaagtatttactatcatgaagcatttcataaatacagatcatgtgaattcatttatttgagtttcttgagaagacctgtgatgaaaccttttgattgataaggctctttgggcagggaaaaaagtcaaaagagtgatttctttttgatcaagtggaatgctactctcttttcttgatatctttaaaatttgtttagtattcacaaagtgtgacctttaagaagttaaaaaatataaacaaggacagtggtgatcttcagtttgtacaagtgaacaatatattatcattgatagctatatctcaccttctgtatcgagaggattattaatggggactatttgtaatgattcgattcttaattgtataatttcagctataccgagaaaaggaggataccatcactcataaagtggtatacagttcagtatcggttaagggtccactgcatggtgtggcagtgaatgaaaattatcaacctttaggagttattgaccgaaagcgtctttcagcaagaaagaacagcaccacatactgctatgattttcctcttgtaagttctatttactgagtttagttgaaatatagatttcttttctgtgtctgtttgtgtgtgtaccacttttttgtaatgaccagatgaaaagacaagtcaaaccatatttcctgaagagaaataattcttgcaggcatttgaaactgccttggaacagtcatgggcaatccaacagccaggatttcaaagagccaaagataaaaatcttttaaaggtaacagagcttaaatttgcagataaagaaggtagctggggtactcctcttgttcctgtggagaattaccctgggctcaatgatgttggcatggtagcctggtttatggaaatgtgtacccctgagttcccatctggaaggacaatattggttgttgcaaatgatgtgaccttcaaggctggttcttttggcccaagagaggatgcattcttccgtgcagtaactgatcttgcatgtacaaaaaaactacctttgatttatttagctgcaaattctggtgcccgtttaggtgtagctgaagaagtcaaatcctgtttcagagttggttggtctgaggaatctaatcctgagaatggctttcagtatgtatatttaacacctgaggataatgctcggattggatcatcggtgatagcacatgagttaaagcttgagagtggagaaaccagatgggttatagataccattgttggcaaggaggatggccttggcgttgaaaacttgagtggaagtggggctattgctggtgcttattcaagggcatacaaggaaacttttacactgacatatgtgactggtagaactgttggaattggagcttatcttgctaggcttgggatgagatgcatacaaaggcttgatcagcccataattcttactggtttttcagcattaaacaaacttcttggtcgggaggtttacagctctcacatgcaacttggtggacctaaaatcatggcaactaatggagtcgttcatcttacagtttccgatgatcttgaaggtgtttcttctattttgaagtggcttagctacattccttctcatgttggcggtgcacttcccattgtaaagccacttgatcctccagaaagaccagtggagtatttcccagaaaactcgtgtgatcctcgtgctgccatttctggaaccttggatggtaatggaagatggctgggaggaatttttgacaaagacagctttgtggagacactagagggatgggcaagaacagttgttacaggaagggcaaagcttggaggaatccctgtgggagtagttgctgtagaaacacagacggtaatgcaaataatacctgctgatcctggccagcttgattctcacgagagggttgttcctcaagccgggcaagtgtggttccctgattccgcaaccaagacagcccaagcaatattggatttcaacagagaagagctcccgcttttcattcttgcaaactggagaggcttttcaggagggcaaagggaccttttcgaaggaattcttcaggctggttccactattgtggagaaccttagaacatacaagcagcccatatttgtatatatcccaatgatgggcgaactccgtggtggggcatgggtggttgttgacagtagaatcaattcagaccacatcgaaatgtatgccgatcgaacagccaaaggtaatgtcctagagccagaaggaatgattgagatcaaatttagaacaagagaattgttggagagtatgggtagacttgatcagcaattgataactctgaaggcaaaacttcaggaagccaagagtagcaggaacattgtggcctttgaatccctacagcagcagattaaatcacgcgagagacaacttttgcctgtgtatacccagatagctaccaagtttgctgaactgcatgatacttccttaagaatggctgccaagggtgtcattagagaagttctggactggcgtaactcccgctctgtcttttaccagagactgcacaggagaattggtgagcaatcactgatcaacagtgtgagagatgctgctggtgaccaattgtcacatgcatctgcaatgaacttgctcaaagaatggtatttgaattccgatattgccaaaggtagagaagatgcttggttggatgatgaagccttcttcaggtggaaggatattccttcaaattacgagaataaactaaaggaattgcgtgtgcagaaagtgttacttcaattgacaaatattggtgactcagctctagatttgcaagctctacctcaaggtcttgctgcccttttaagcaaggtaaagcacttgaacttttcatttctttagctacgttattatttggttatgttaattgtttaaggtttataacttggttcatcatatcttgtaaattttggtgcagttggagccattaggtcgcgtgaagttgacggatgaacttcgcaaggtacttggttagaggaccctgtttgtgtcttttaaatgtaacgcaattatttgtgttgattccattggctaagttgttatccccaagggaaaggaggcagttgcatccctcattgctgaagggatccgttgcttcagagtgtaaatgaaatgagtcctggatggtaattaatttatgcagttaggggatcacaaccagcatcaccatgttccatctatttatttgctggttgattgattcttttcgtatagttgaataaaattataataatgtgtaacattgtttttaatgcataacgattttgggtagtcaatgtatgttttccacaaagtttcaaatcaccaatggcagttgattttaggcaaatattaatcaagatttttccaacaagttttaatacatctgattgacgcatagaattagaattagaatttaacattttacttttactttcaattttacaaatttgatattgatttaaaattatattgtttacgtttaagtcgtgcgaacaattatacttttaagttggattttaaccattaatttggatttaagatctagagtttgaaaataaaatgaatgtaaaatatataaaatgatgttaaaatagagataacaattaatgttattttaaactcttaaaaagacaaataaatacttatttagctatttagggattcacctcccaacatctatcccaacaatagctgaccaattgcacgttgatagtgccttgatgcatatcttccacatcttttaccgcagtccctctcattctagctatatgcatatctttgcatagtggttcggataaatccgacgttaattttcacggtatcctaatgagtatggtaccaaagaagaattgttaaaaattaaataaatattgacttcaaaataaatgttccaaattctattaaaattaacttgcaatcaaatgaatcaatgaaatgatttatggataccatgaaacaatgatgtcccaaattctattagacgaattaaaaactcgcttcggtggattagcctactgaatattgatcacttcatttgcagttgtactctaaaattaattcaacaattcacgtgataataccggtatgagaaatatacatcaaaactgatcaccacggcttaaatccatgggagatgtactagctaaaaatcaccaagcacatattgggaccctttctatttaccaatacagaacttgccaaatatatttgataaaacctcctccgatatatcttctccacttatctgtccaagggacaatgccgcatccctcaagtcaattgtccaaaaatccagaggcagttcctcctttattgatgattg

SEQ ID NO: 327 - DNA, 4738 bp, Glycine max
  source 1..4738: mol_type = genomic DNA
ggtaaataagtatcttagtttatagtcattcaaaaaaatatcctaatttatataagtgttttttatttagtaatttatttctaaatatttaattagactattccgtgtgttaaatatattttaaagaaaaagatcatatcggaggaggataaaaaattgtaaaaaagacaatttgatttgtaacgagtgaattttgaaaagataaatcgttgatttttttagttgtgtattctatagtatttttctttctcttttaaaagattaaattaaaatattttataaaaaatatcttgaacataagatatcttttaatttcatattttatatgaaaagataagagtagatatatttttatttagtattttcttttttcacttttaaaaggttaaattgtttttatttataaaatattaaattaaaagagatatcttatatgttcaagatataatttaaaggaaaaacataattagagaaggattgaaaagaaaaaaaaatcgtaaaaaccagggtgattactgattagtaatgagtgaattttgaaaaagataaaacaggctttttgagcgggcaagaaacaaacccaaatataaaaccactaacgcgctttacacggagttagtgaaatccaattggtcagttatctaaagcgcacggacgacgtcattaatccagccaatagcgcgggagaatcactattacaatctatccaataccaaaaagataaactaaaaaaagcaacttcccctcgtcagcggttaaaaatcctagtctacgcgcgtggagctccaacgcgtgccacgccaccgcggattcgtaatcggaaaattctcgaatcacctagagaacgttggagaaaccccacaccccccacgcaacacttcgctttttccattaagaaacaaatatatctaccgtccaaatttactgatccaacggttcacagcccatgccccgaaccttccagaattcaaacacgttctttaaaacacaccgcttccctttcctctcttcaattcagttcaagaaattgctttgctgtaagtttctgattcctttcttcagaattccaagttttcatttcgttagggacaaaagattgtgagatagagtatggctggaaaaggcgagggtcctgctatcggaatcgatttgggaacgacgtactcttgcgtcggcgtgtggcaacacgatcgtgttgaaatcatagccaacgatcagggtaatagaactaccccatcctacgtggctttcaccgatacagaacggttgatcggcgatgcggcgaagaaccaggtcgctatgaacccaatcaacactgtttttggtaagtactctcaaatcgtccactattaccttgattctctgctttttttctctgtttcactgattttggatgtctacacatcgtgatttataatcataaatttcaattatctgtaatctaaccctagtcagtattaatctttcacgattctttctttttaattaaaaaatagtgtagcgaacttaaacagttgtttcatgtgttagtaagcgtttgtgagacgtttattaacttcttactttgtgattttttttttcaattgttcttgatttgagtttattaataaactagtatttatttgaattagttgagtcgtttttggcgtgagtcgtttttggcgtggtttattaaataagtacttgcttaattgaattgttttatatgttttgcatgataaatttattaaatggacacttgcttaaataatctgcgcgaaagctttcctgattatgagattatattgtgaatcgattggtgattgtgttggtttggtttggcgcgtgcagatgctaagcgtttgattggaagacgtttttctgatgcatcggtacaaagtgacatgaaactgtggccgttcaaggttattcctggccctgctgacaagcctatgattgtggtgaattacaagggggatgagaagcagttttcggcggaagagatatcttccatggttcttataaagatgaaggagatcgcggaggcgtatctaggatcgacgataaagaatgcagttgtcaccgtccctgcttacttcaacgactcacagcgtcaagctacaaaggacgctggtgtcatttccgggctcaacgtgatgcgaattatcaacgagcctacagcggccgccattgcttatggactcgacaagaaggccactagctctggggagaagaatgttctcatcttcgacctcggtggtgggacttttgatgtctcccttctcaccattgaggagggtattttcgaagtgaaagccactgctggtgatactcacttgggaggtgaagattttgataacagaatggtgaaccattttgttcaggaattcaagaggaagaacaagaaggatattagtggaaatgccagagcattgaggaggttgagaacagcatgtgagagggccaagaggactctctcttccactgctcaaaccaccattgagattgattccttgtatgagggtattgacttctacacaaccatcacccgtgcccgtttcgaagagcttaacatggacctattcaggaagtgcatggagcccgtggagaagtgtttgcgggatgctaagatggacaagagcaccgtccatgatgttgttcttgtcggtggttctactaggattcccaaggttcaacagttgttgcaggacttcttcaacggaaaggagctttgcaagagcattaacccagatgaagctgttgcctatggtgcagcagtgcaggctgccattctcagtggcgagggtaatgagaaagtgcaggatcttctgttgttggatgttactcctctctcccttgggttggagaccgcgggaggagtcatgactgtgttgattcccagaaacacaaccattcccaccaagaaggagcaggtattttcgacctattccgacaaccagcctggtgtgttgattcaggtctatgaaggtgaacgtacgaggactcgtgataacaatttgcttggcaaatttgagttatctggaattcctcctgctccgagaggtgttcctcagatcaccgtttgctttgacattgacgccaacggtatattgaacgtgtctgcggaggacaaaaccactggacagaagaacaagattacaattaccaacgacaaaggaaggctttctaaggaggagattgagaagatggtgcaggaagctgagaagtacaaggctgaggatgaggagcataagaagaaagtggaggccaaaaatacattggagaattacgcctataacatgaggaacacaattaaagatgataagattgcttccaagctgtctgctgatgataagaagaaaattgaggatgcaattgagcaggctatccaatggctcgatggaaaccaacttgctgaagctgacgaattcgaggacaagatgaaggagttggagagcatttgtaaccccatcatagcaaagatgtaccaaggagctggtggtgatgcgggtggagccatggatgaggatggtcctgctgctggcagtggaagcggtgctggacccaaaattgaggaagtcgattaagcagaccaattgtcatgggttgttcttgattttgcgaagacccttttgaagtttagataataacctgtcttgtcattatgttttggatttggattttacttttctcgtttttttaatgtacttttccccgtttcaacttaacaatgatataagttgcatatggtctattgattgtttcgtctccatatttgcttaattgcttatgaagtgggttgctctcccatttttgagagttgaacatctcttgctagattgtgtcacaattataacttaaaaacgtcaaaaaatgatgaaaatctatttttttgggagaaccagaaaatagtccttttccccaggccccaaaatagactcagatttttattttttattttttttaactgaataaactcatagatagaagactacgcaaggaacttataagaacatggcttaagtgggccagtgtcaaatagttcgtaaaattaacaattcatgtgtataagtttctgttgtgaaaattataaaatactacatttataacagtgcgtgttggcatcataaaatgtgaatattaataaaggagacttttccaacgtatgttctgagagaaaagagagttgaatataatgttgactttaattttgaaatttattatttataaagtgggtttgggatttaacaccgggagagataatctcaaaaggttttactaaaggagaatatagaggctgaaaaatcaaaaggacattatcctttttagggtcaagaaaggagaatcaattcaaagtggaaactgggctaaagatcctttgtggggcaaactaatttggaatgggccatgtcttggcattacgcaagtgttaaatataccttccctatttaataaatataccttccttttccttttatttccataaaatatccttgtagtttatttccaatttcagccacttaacccccttctcctaacacccatagtcaaaatacaagcataaatgaggtactcaacttagacaagcgcacaaacaccatcaataaagccatcagggctaatgaaattgagtatgcacagtagtaacattgcttttgtgatttttaatttatttgattttttgggattggaggtggagcaaatcaaaggtaaccaattcagattgtgatttcctcttttgaccaacctgtggggattg

SEQ ID NO: 328 - DNA, 6682 bp, Glycine max
  source 1..6682: mol_type = genomic DNA
atcacattttcattgaaaaaacacacatacacacaaaaatgcacctctcacatagactaagaagacaaaaaaataaggcagtgggagagaaaaagggtaaagaaagtgaagtaggagatggcactgtgaagcaaatggaggagaaagagaagaagatggaagcaagtggggagaaaaggacgagaggtaggggtgtagggaaactgccaacagggtagttttgggagtaagaattttgggagtgataatagcaaccctcaagtaagtcctttagcagaccaaacactaaaaatacaaacgaataaacatctaatgggccttagactcaggcttaaattgaagaaccatacatgtcagtgtcaccctgcaaaaaaggtgagaactgagaactattacaaaattgttatatgactgcatgctgagatttattaaattcttaaccgaccttaagactcttatgtaaatgtgttttttcagcgtgattttttttattttcaatttattttaatattctaaaaatcatcaagttctatgattacttttttttaatatcaaatattaaatttattgatgaaaggaaaattcaattgaatccctttaaacatagtttggaatatccttaaaaacatgatttgtgaagattggaagataatttaacaaaaagtataaatgtataataggaaatgaaggtgtaactgtgtaagtgaagacaagcataaaagagaaatgaggagagggaggtgaggtgtcgcgtgctaaggaagccaagtggtgcagatgctggcatcgttttctagttttaagggattctgttgcaaaccccactcgctacgtatctgcatgcatgatgcatatgcatatgcatggtctcagggtaaaccgttcctttttcttcattcatctttaccaacccatcctttcatatctacggccaagatcacgtagaaatggacggtgatgattgaaagattgcaccgccaagtttatttgttgttttaggggaatttggcctgcgttgcgttcttattaggcgagaagaaaggaataaagaggaaggaaggtgtgacactactgtcatactgcactgcttataacttttttctctttctctcaattcaattgccttctcccctgcgaatctcttctccacgtatcggtaaacctattcctctaacccccattctcattctttcatcgcattttactttattcatcttaaacagccctcagtctctcatctgttttcctaaccgcgtttcattttttatttattttgtttttatgcgcagattgtccctgcaaattgcactttataatataataatcgctttttattttctgtttatgtcaggcgaattcaattttttttcttttgcttcccttgtttcggtggataacaaaaaaaaaataaaatctattatcgaggtctctttttcaaattgcacggatgcgtcgattttttttcgataaaaaaaaatccatatcggtatgatcgaacacatgatattttttttcgttcgtataccattcggtgattttttttttataatttttcacaactcaattttcttgttttgtttgcattggtttttgtggaatagactatttttttgactgaaatggtggaatagactatagagattagaagaactgacacaagattttgaaatgtctcgtttttttttcacgtccccataataatatatttagcattttcacttgttagttaaagcccacatcccctaatttagagtaattatttatgtgctaacaattgcaattaaagtttattaatttggatgaataggagaacatggggaacaagatgaatgcgatcgcgttgtgcttgttagtgtcgaccctgttggtttctgcggtgtattgtgcaccgaatgctgggctccgtaggattgggctgaagaagattaaattggaccctaaaaacaggcttgctgctcgagttgggtccaaggatgttgattctttccgggcttctattagaaagtttcatctccaaaacaactttggtggcactgaggaaaccgatattgtcgcgttaaagaattacttggatgcacagtactacggtgaaatagctattggaacttctcctcaaaagttcgctgtcattttcgacactggcagctctaatttgtgggttccatcatctaaatgcaccttctcggtgagtttctttttttttttttttttttttttttttttatataccactctgttatttaggacttgtgaattagtatcaatttaattccttatttattcatgtcattttgcattttggtgcaggttgcatgctactttcatgctaagtataagtctagcaaatcaagtactttcaagaaaaatggtttgtcttgctcgtcatttctaataaggctttaaagttaacttcattcttttagtccgtgattgaccttttacagtttgcagaagttccctctttttataaattaaaaaactgaagttttgagatttgagtaactggctaatattctatcatctgtcggagtatattgaagtcgtgtctttcctgtctctgtataatatcaataggaacaaacaaatattcttttcctggtgactgaaacggggtggggtgtgaacatttattatatgatggagctgaagtttgaaattttaccatccatcatatggtcggaagtttgtagtttctgacattgtaattgtgacttgtgcttgtttatatgttcatctattttgggccactcgtcattttgtacctgtaaaagggatgctctgattacgtctttctctgcgacaatatttttcttgctgttatttagggactgctgcggcaattcaatatggtaccggagcaatttctggtttctttagctacgacagtgtcagagttggtgaaatagttgtaaagaaccaggcaatactgaattgcggatcatcaatgtttatttcaatagggcttctttcataatgattagtaattagtagttggtatccccttcaggaatttattgaagcaactagggagcctggtgttacatttttggcggccaagtttgatggtatactgggacttggatttcaagagatatcagttggaaatgctgctccagtgtggtatgttactatttaaatttcgattcctcattttgttagaagtttattgaatttattgaattttgttagtgcttactacatcagaccctactggatctaactcttcctatagtgagagtcttatagaaccaggctacccttgttattgtttttaaaattttattgaatccccatgtgtttatctgatcttacctgtcacaggtacaacatggttgaccaaggtcttcttaaggaaccagtattttcattttggttcaaccgcaatccagaggaagaggaagggggtgagattgttttcggtggtgttgatcctgctcactataagggaaagcacacttatgtgcctgtgaccagaaaaggatattggcaggttataatttttttaatacttaataatgctttctttttttacctttttctatatgttaatttttatttttgttttcagtttgatatgggagatgtacttattggcggtaaacccactggtatgtagagaatgtgttagcagaaattgataatttgttcttcctatgatgcatcattggcatttttgtaaatgggtcagagttttaatttatttggactgacctgatctatttgtctatcaggatattgtgctaatggctgttcagccattgcagactcagggacttctttgttggcaggtccaacggtatgaataaatgagtgtagatatagattgattaatgtttatgtagtattcaacaattatgggggtctttagacattgataattctcattgcgttgtttatattgcatgtgaaaaaagatctaacaaatgcttctaactagcttgtttctatgatcacatatgtggttttgttcttgtagactgtcataactatgataaaccatgcaattggagcatctggagttatgagccaagaatgcaagaccattgttgcagagtatggacaaacaatattggatttgcttttggctgaagtgagtaccatttgtaatttgttctccctgcatattttggttgattaatggtcatgagtgggtatgtttgaaagatatgattttctaataatttttcttatgtttttcgcttttgcaccttttagacacaaccgaagaagatctgttcccgaattggattgtgcgcatttgatgggactcatggtgttgagtgagtcccgaagatatttttattccttgaatctttggtcatttatttaaatagtttaatatatttatgtaaaatttccattttattatttgttccttctgcccttcagtgtggggatcaagagcgttgtagatgagaatgaaagaaaatcattgggtggtcatcatggtgctgcttgtcctgcatgtgagatggcggttgtttggatgcagaaccagctgagccgaaatcagacacaagatcagatactaagttacatcaaccaggtgagtcagttgtcttaattttgctattcaagcgtcctgctgcacctcttgatttatagcctcatgatgatagattgatattgcagctttgcgataaaatgcctagcccgatgggagaatcagctgttgactgtgggaatatctcttcattacctgtagtgtcctttactattggtggaagaactttcgaccttagcccagaggaggtatgatttcccccaaaggctcaaacctgattagttgcttttgcaatgactagtcactaaccagatttaatttaatggataaagctaaattcatgaagagcagcaggagttagagtaggggaggatcaggaaactttttatagaaaaataaaatcagaattcaagttaaagctagtacatcaatagctttacggtgtctttgcaattgcataactttacctaaagaaacacatcctataggtgccttattttccatagagtaatattatcctgacataataaatcgggttttctagttaagtggttttatcagattgacattgacatttagttaaatgtgattacgcgagtcttcttctctgttgtcctcactcagcttctattttatttattcagtacgtactcaaggtgggtgaaggtcctgtggctcagtgtattagtggctttactgctatagatattccacctccacgtggccctctctggtacttaaattgcttcaattagcgccattatatttgcctcactttttttcatcctatgttgtctttggattgtgactcaaatcactcaatggcatctccgttaatgtaggatccttggtgatgtcttcatggggcgttatcacacagtgtttgattttggtaaactcagagtgggatttgctgatgctgcatagagtgttagcgtttctcagactatggcgatccaattgctattattagtttatataaccgttgcagtcaaaatggacctaaagttctggcttgtacaggtttatattattaatgttaatactttgggtgttccataatactaaaagcttaacagatgtatctgcggctgcgaaatagtccataattggctccgtagactctatgcatgttttagttgaaagggtatagctatggttctcatgattccttgttagttccctctgttcgtcttcttttgcaagatgcgtgtatggggttatatgcgatgaccttccataatgatagtttgcttcatattaagataaaatagaaatcgaaggagtcagctttcaaatttcaagttacagatataatctatatctatatacagtattagggaaatttgtcaatcaactaaagatgtaaatagccgatcaaaaaaaaaaaaaaattaaagatgtaaataatttgcttcatattaagatgaataatgagagtatttgtaggagttgcacttgaatgaaagccctttttagagttatttttactcattgggccgcctctatcttgtcctaatcttatataatttaatttgatttataacaactagcctgaaatttttctcacaaatcatctcaaatcaatttttttttttcatttaactatatctctttcaatctacctaaataatttagtatcaatgcaaaatatttatgataaattcaaaatataatttataagcataaaaaatttatttattccaaattttaattatatagtttatatatgaaataatattttatttatcatcaattctaattatataaaataaatctttatcctacattatactgagttaaaatgattaagcgtcttctcagggcatgaaaggatcatatgttcatttggatggcaactagtggaatccacgatcaaagttaggtaaagtaggaaaagatcatataattttttagccactgcagggaaaaagattaaaagaaagacaatagaggcaattacgtgaatataattgattttcctttaattttgctctcagggtcaggggtttaggcaggagcactctgaaaccgctcatatttaagtcaattctttcccactaattgttgggttcaccaatttatccctcgcgagttggcaatagttgctgtccaactgtacatcttgttatgcaatattctggttgaactataaagctccgcttgaacagactacgt

SEQ ID NO: 329 - DNA, 8014 bp, Glycine max
  source 1..8014: mol_type = genomic DNA
attaatggtaggttgaataaatgggtttggatattttttttggagttggctgaattgggagccgtcatgaaatccgaaatagaagtgaaagaaaagaagggggcaataagcgtagtaaaacctccctcccatccaagatcgacaactgtctttgttgtctgttttgggtaccaacaaagccaaacccacttgctcagtttagtttgcttttttatatattaaatgcacaaattgctgccagaatcggagtgaatctaatctcgcatcgcgtgtaaaatccaataaaatactattttattattaaaatgtactactattgatgtttttgttatcataaagattataagaatttagattaaatatatgaataatataagcttttattatgttttaatttttatgtattatgagtatattattatcaattaatcaaaattcattgtaaatatttaattatttcaaaattcaataaattgattatacattgtaactatgaccagcatataaattatataatattttatatattcaatctaaattattatatatgataaaacttttaactttaataagaactattttaaaaattaagtataaaataatttttaattattttttttataataataataatatataaaaattaaactcttataagaagataagtccgcagaaatgattaaagattccaaaataattcttttcttctttttatggatataaatttgattctctttaatatgaaaattctatttggtgtggacgacccttttcacataggttctcctaatatttaagaactagttgaataaatgtgaacttgtgattcaataaaattacttatagtttagactcgcacaacaataatctttcagatgaatttttgttactaatagtcctaacacatatactcaacatcctatccaaaccaaatagtctacaaggagtgctaactaaatagtaaatgttgattttggtatattggccactcataaaagctcgaactgtagaacgaataaaaatgaggaattgtttaatattatttttattttaataatcagagttcattccccagtaactcccacattcacatggtgctcgaactgggtactataaaaatgatatctttatgccatggtggtctctggtcacactcacagttgtggtggtgagtttgaagaagactagagggggttgggttccatggttgttgttgttgcccacacctcttttctttattttaacccttagcctcattgcttccttccctttgttcccactctttcgctttcaaggttcgttgcttccatactcatcttcccccccctcccctcccttttctccttcctctgctgttgtgatgttatgttatcacttatcctattcactttcctgcttttaatgtttctgatgcgtgtccgtttttcatgccaaaaacatgttattgtttcactggaaattgttttgtcggctcatggttgttcagtgtgttaacgtacagtatgatcaattttcttcaaaattaataataataacgctcaattttattccatcattaagcatgtacagttgctgtgtgattgggttgttgttcacaatttgtataggctctagagaagggcagaacaataatgatgtgtatttatttgttcacctgagctgtggagattgtttgtatttcatgattgggtcatagaataaattttttagtagttactgaaagttttttgtaattttgtcatcttgaggaatgcgttggaaattttttattatcttcttgaattgttacatgagcaggagcgatgagttggatggttaagattggagggaagaggatataaggtgagttgcatggttaagatgagaggaaagaggggaaaagttgcctgttcgattccttctgctgacaaaaactaacacactaacatttaacatttgccgataataaaaaaaacatgaacaggagtgaattgattggcattggagtaaattgataattgatttaacttgtttttcagatgttcttatatgattcatattaacttactaatttttttttacattgccagtgcagtttggagtgaaaatgtctacctcaaggcctagccaatcatccagcaattcaaggagatcaagacatagtgctagaatggctcaggcaactgtagatgcaaaaatccatgcaacttttgaggagtccggtagttcctttgattactccagttcggtgcgtgtctctggtacagctgatggagtcaatcaaccaaggtctgacaaagttacaacagcttacctcaatcacatgcagagaggcaagatgattcagcctttcggttgcttgttggccattgatgagaaaacatgtaaggtcattgcatacagtgagaacgcgcccgaaatgctgaccatggttagccatgctgtccccagtgttggtgaccaccctgcccttggcattggcactgacataaaaactctattcactgcaccaagtgtttctggattgcagaaggctctaggatgtgcggacgtttcgcttcttaaccccatacttgtccattgcaagacctctgggaagcccttttatgcaattgtccatcgcgtcactggtagtttgatcgttgactttgagccagtcaagccttatgaagttcccatgactgcagcaggtgccttgcaatcttacaagcttgctgccaaagcaattacccgattgcaatcattgcctagtgggaacatggaaagactatgtgatactatggttcaggaagtttttgaactcacaggttatgatagggtgatggcttataaatttcatgaggatgatcatggagaggtgattgctgagataacaaagcccggtcttgagccatatctgggtttgcactatccagccaccgacattccccaggcttcacgctttttatttaggaagaacaaggttcgtatgatagttgactgtcatgcaaaacacgtgagggttcttcaagatgaaaaactccaatttgatttgattttgtgtggttccaccttaagagctcctcatagttgccacgcgcagtacatggctaacatggattcaattgcttccctggttttggcagttgtagtcaatgacaacgaagaagatggggacactgatgctgttcagccacaaaagagggagagactttggggtttggtagtttgccataacactactcccaggtttgttccctttcctctaaggtatgcttgtgaatttctggctcaagtatttgccgtccatgtgcacaaagaaatagagttagaatatcagattattgagaagaatatcctgcgcacccaggcactcttgtgtatgctgatgcgagatgcacccctaggaattgtatcagagagtcctaatataatggatctagttaaatgtgatggagctgccctcatatacaggaacaaagtatggagattaggagtgacaccaagtgaaccccagataagagagatagctttgtggttgtctgagtaccatatggattccacaggctttagtacagatagcttgtttgatgcagggttcccatcggctctttctctgggtgatgttgtgtgtggaatggcatctgttagagtaactgcaaaagacatggtattttggtttcggtcacacactgctgcagaaatccgatggggtggtgcaaagcatgaggctggagaaaaagatgatagtaggaggatgcatccaagatcatcattcaaggctttccttgaagttgtgaaggcaaggagtttaccttggaaggaatatgaaatggatgctattcattccttgcagataatactgagaaatgcattcaaagaagataccgagagtttggatttaaacgcaaaagcaattaatacaagactaagtgatttgaagattgaagggataaacgatttgaagattgaaaggatgcaggaactggaagcagtgacaagtgagatcgttaggttgattgacacagcaacagtgcctattttggccgttgatgttgatgggctggtcaatgggtggaacataaaaattgctgagttgacgggtcttccaattggtgaagctactggaaagcatttactcacacttgttgaggattcttcaactgatagagtcaagaagatgcttaacttagcactgctaggtatgtctttttttctttctctatcttatccttctatactcttttcttttctttgttttttcaagccttatcattcataagcaaaagcttaaaaaatgagttagtatgtgcctgtgtctatctagctgtgagcaactgagcatattatgttccctaaagccacacatgaacattgcattggtgaagaattctgagaagaaaagtatgtcttgttgacagtttcattcaattttgtgcccttacaataacttgggaaggaatggaacaccctaggagttgtgatgtcatttttatattgggggcttggtgagaggaattgatgcaatttatctgacacagtgggcttgtattcttctaacctgctttccatatttcttaattgttgttttgttctgttaattaggtgaagaagagaagaatgtccaatttgagatcaaaacacatgggtctaagatggattctggtcctattagtttggtagtaaatgcttgcgcgagcagggatcttcgagataatgttgtcggggtttgttttgtggcccatgatataactgctcagaagaatgtcatggacaaattcatccgtattgaaggtgattacaaggcaattgtacagaaccgcaatccattaatccctcctatatttggcacagatgaatttggctggtgttgtgagtggaatccagctatgatgaagttaactggatggaagcgagaggaggtgatggataaaatgcttttgggagagatttttggcacccagatggctgcttgtcgcctaaagaatcaagaagcttttgttaatttgggcgtcgtacttaataaagccatgactggttcagaaacagagaaggttccttttggtttctttgctcggaatggcaagtatgtagaatgcctgctttctgtgagtaagaaattggacgtagagggcctagttactggggtcttctgcttcttacagctagctagcccagagctccaacaagcattacatattcagcgtctatctgagcaaactgcttcgaagagattgaatgcattaagttacatgaaaaggcagatcaggaatcctttgtgtggaattgtattttcccggaaaatgttggagggtactgacttgggaacagaacagaaacaacttctgcgcactagtgctcagtgccagcagcagcttagtaaaattcttgatgactcagatcttgacaccatcatagatgggtatgatatctgtgcattttgttctttttcccccttatttacattcatgtggtgtgaagcatttatcagttggaactcctactaaagcataaaagttcctatttgaaacctcattgaaactcatgactagaaagttaacctcattcatgcaactaaactccaaaaacattgactagtatataacccaactgatattgggtgtttactgttatcatgttctgtttttttttttttgctcagcaaaaactgttatcatgttatgtagttctcaaggttcttgttatgtagttttgtcatgttttgtacttttgttagagtttagtgtacctatttagaagtttaaatattagcatctttgaaagaaggcatccaatgtggatgtttatttttcattcacacggtgctttcaaagtcactctgtagtgctagattaatttgtgtaaaaatacagtttcctcatttatttgtcttggaatcttcgataacagttttataatcattttttccccctgtatgttcaacagttacttggatcttgagatggctgagttcaccctgcatgaagttctggttacctcccttagtcaagtcatgacaaaaagtaatggaaagagtatccgaatagtcaatgatgttgcagggcatattatgatggaaactttatatggtgatagtcttaggcttcagcaggtcttggctgactttttacttatttccatcaatttcactccaaatggaggtcaggttgttgtagcaggctctctaaccaaagaacagttaggcaaatctgtccatcttgttaagttagagctcaggtaactcttccatgctcgcattcccactgtgtatgtgatttaaatgcctggcggaaacactgccataaattgttgcatgatcaacacattgttctcttgtgctaggcaaagaaacttgcattgtttatgcggtcttgctaaccattaaggacactgattaaggaatcaacaagtggttgagattatacgttttctaataaaaaacttttcacttttgattccttaaccagtgtcctgattaacattttccttgttttcaaccaaaacataaagaaggaagttacactataaccttgatttacttctaagtgagtgttacttttggtatttatgtagcataacacatggtgggagtggggtaccagaagtgttactgaatcagatgttcggaaacaatgggctagaatccgaggagggtattagcctactgataagcagaaagctgctgaagctgatgaatggagatgttcgctatctaagggaagcaggcaaatcagcttttatcctctctgctgaacttgctgcagcccataatttgaaagcttaaaagttttggaaaaaagaataaaagatgatgcaacagcaacacaatctgttttctacatcataaagagaacggagctagaaattaatttgcatccaatgtaactctaatttgttcccacgtttctttaactgcttcttgtaacgtacgttgtagatatgtatgattaatcttcttcccattccttgacctgttctcattctcactagagcttttccttatttattccttcagcaaacagcaatgatgaggctaattctgtctctcgcttcttatcttcacgtgttagccatggttttctacctaactttttttctttttgattaccacctaactttttttttcctgcttgcaacggtatataagttgtcttcaatttattgatctgcacatttattgcaggttgtttgtattcgtggatttgtaaacacggttttcttttctctgctagctgtgtttttgtacgactaatgattcaaattcgatcaaatgaccaaaagaaatcttaaaccttagacttttctcattcttcatatgttataggcgtgtctgtcgtaattaggatttttataaatataataaaatttagaaaagtactaaatcttagagtattttaaatgaaaaaaatttatcacttttgtggatcctataatatcacaggatacaagaatttttatcatttttactttaatagtagaacttaatttgggttattagattttatttgcatataaaaaaccaattttttctctctcaatgacattaaaaataatatttttttaataaaagtggaattcttaaaagtttttcctgtaattcaaccccagccagaactcttgagcagaacaagaataaatctagtggataatgattctttaactcaagaattaaactcaataactcttattaaaaatgttcttacaaacttacaaataaataagataaaacgtacacgtaatagtgttttctctctataccgtgattggtcaatcagtttcctagtttgattttcagtgtaaaattgctactattcgttaactctcaaggaaaaatcatgtcaatatcaagcttgactaaacttaagtaggttaaataatcttactaattaattaaaaattaactattaatattacgtgttcatacaaaacaaattatgcatgtagtagaatatcaacatacacgtatatcaaatacaatacgtatctgatgccgtgatacacgattattttaaattatataagatataatacgtgtaagatatgtatttaagaatat

SEQ ID NO: 330 - DNA, 19958 bp, Glycine max
  source 1..19958: mol_type = genomic DNA
ctctttattaaataatgtttctgttttggacatgggcttggtttttaccaaatgaagaaaaagatgaggtttcaatttttctattaccataaaacaattgtgtcttaatatggtggggctgggggaaccaattggggataggtggatgaataaggaaagcttggtctgattagtctatactatatgccttgctatttccctttttctgagtttctctctgcacttcttgctagctaccctctcttttggggtatttcttttcattctccaaaaactctttaattttccttcccttttctgtgctattctctcctcactggtcaaaaggtttgtgggattttgctaatttggtgcaaatctgattcctttgacaaatccctcttgatctcctggcttattgaaaactactacaattccgagttgctttttttccctagttggtaagaacaatcaattttcaatcaatcatatttgtttttttcatgtgcaaaaaaaaaaaaccatctctgggatttatgtttcttgggttttagatccttatttttgggaagtcatgtacatttactggtactttttttccttataatctgcatatatctgggctttgtgttgaatggttattattcttctgctttgctttcatgcttcagtttaacttttctctcttcacatcctccatattgcaaggtttacacaacatcatttttggcttttaatggttgtcctttgatgtgtggttctcatctgatggaatcttctttgtgtttcagcttttctgggccttgaaatcttgcttggagaaggctcaattttggtggaaacctctaccacaagaaagcatagtttttttgggttaatcatacttggttaggactcctttgagataccatatagtcaacttgtttcagtttagtgaaaaaagaaaacatttttttctaactattattcatagtttttctttttctttttttctctttgttggtgttgattcacacattagaggtgtttagagatggtgagaggaaagactcagatgaggcgcatagagaacgccacaagcaggcaagtcaccttctcaaagcggcgtaatgggttgctgaagaaggcctttgaactttctgttctttgtgatgctgaggttgctctcatcattttctctccaagaggaaagctttatgaatttgcaagctccaggtatgcatataatatgtggatcctcataagtcataacatttcttcttttctagatctttttatttttctgtcacaaattgttactttgtgtgattgcgtgcatatgctaaatgcagtacaatactttttttttgctcttcatgcaaaagttcctttcaattttttagcgagtagatttcatttagacatatgtatgtgttatgacaccatatacagtctcaatagtactcaagatcttcatcataatctcaaaagtgtaatggtagatatgagttacgggctaaggagttatttgattttttttttcctattttttaatcctaaccttagaagtacagtggggtatggataacacctgaggagcctaatttgaagtcttttcttttggggctttgaggagctcagctattcagtttagagaaagactttgatattacattcaagtgtttaagggatttagggaaacacttgaatacttgataacattaaatgatttagttgcttatctcaatggtgttttaatttttatttttgatagctaaaatttttattgatgtaaagagctaatcttaagcacaagttgtgccgaagactagtagagatacaaatcaccaaagtgttttaattaattacatgtgcattgaagccaatttcacctttctttcactatgcttaagcttggtttttggatttcagtaccatttgtttaaaaagattcacaatacttacactttgtgcagtgggtggggggtaaggtagcgtctgtcatagttttcaaacttgcctctattggaatcttttcatactccattttccactgacatttttcatttctcgtacgttagatcactcgtcacattaacatggtggttgcatacattcatagtgttgttaaaatatcattattgtttcctctattatttcttttttgtaattgaataaagggtgcacttattgtataaaaaggaaaaattctgaaagttgatgtactcgtttccttcaacaatgaaaaaagagccatcacatgcatgcagttatagacctagcactgtatcaaacgtactaaaatactgacatccaatttcttgagagagatataatagagagaaaggactccatataatgacttgcactacataactatgattatatgactccaataatatctttctccatcaataaattaatattacttttgggttgaagaaataaggtctcatgattcagacttgtaatatgactcaacaaagtgagcaaattttgttcaactgatatagtttgtgaaaagaaaaggaaaaataaaactccgttagcgaggagcttgtgaagttccaatgttccatgaaataatgtgcggtgtatcaccacagttttcaaaactagaggcacactaacctccttacgaggctgtttatgttttcataatttcattattattatagtaagaacttctagattatatatagtttgtagttgaaactgcaaactgttgttatttaattaattgggtccgaatgctgatgaatttgtttaataaccagagttatatatagtcatcagtaactaagtatgatgtgagagtggtttctcaaaaacataatttcaaaaccatacctatctgtacatgtcctttacctttcctatttctttttgagttgcataaaaggtacaattgaaaatattttattaggaatacatcaacgacaaagctttttctcgttaagtgaggttgactaaaattgactattgatgaagttatggaataatatgcagttaaaactgcaaggtaccattgtatgcttgtaggattttttcaaccatatggttgaatggctgacgcatgatatgttactatgtttgctttaaagttgaagtgttttcagggaacctgcaacttatcagaaattttcttaagttttgtagaaaaaaaaatttaaaattatatacattaatatacttctacttcttctatccttcctgtgattttatactttgggcttaaggtgattaatgttttgaatgttaatatcaacttgcatgttttttgtccatgattcccacaacaacaaaaaaacaatccacagataaagggccaacatgtggtaatatatcttgttacatgtagctcttccttctgtacgcggctcttgttgagtcattgtgctggtgagccaacttccttttggtcttccacaagtcgaaatgagaatagttttaattattaatatacataaagaaaataaattacacataatccttgcccccatagagaaaggaaggtaattaagctagtaaggtttattttaaggttaatagttcatagacatttgatgaagaagatattaatatttctctccaaagaaaaagctaaaagattgttcaactcagactagatctcataaatatttctctttgcatttcttggcttcttatgtgacctacagttcaaatgtactaattcagattgaaaaccgaattgtacttccaataatgtgttttggctgaactattcttgaactaagctatgtaataaattgttgtttctaaaactttccacatctggccgatatatatatatatatatatatatatatatatatatattgctcatgtgccatataactctgctccgcttgcattactagtttggattttgtagcaaacctagtgtatatttttcatcttgattgaattgatttaaaagatttaacttggaagacttggtgtggaaaggatggatttgcctttaaaaatgatatttcaaaatttatttcataaaaactagttttctttgaaagaagtatatgttgaataaattttcttcgtttttaaaagttactcctttttattttttcaaaaattattttctaaaaagtacattgtgctgatagacaataaacatgttggttttcctctcacgtgaactgtcaaacggcattcctttcaataccatcactacatattaaacaagttcttagcagtctcattcttttatatgatcgagagaagtgtacttttttctttctttctttctttagtgtaagggcttagcagcttattggttggctgcttgtgacaattgttttgtggcatatggaggcaagaaagcttcagacaattatttatttatttaataaaaccttatattattagttgtaagtgaaattaaactgaattaatcttagttgtgccacaacagcattaacacaaattatttgaatgtagaattactgatcaaggcttggcacgtgaaactggtccctcgaattaagtacatcacccaagctagggttttgactatgattactatcttttgtgccagttattcatgcaacttctatgacctttttcttctagtgtgctactgccacttgatgagtttgagctgaatattaagaatttgcaactgttcacctcagtttgctttgaattacaatttgagaacatatttaattttttttgtaagtaaaagaatattattaaagttgaagacaagggacattttaatcatacataatacaactagctttagacaagttcgaaatctgtcaatgtagttctaattaagaactgattaatatattcacggagactaaaactcttatgtcactaagtgaaatcaaatatatgaatcaaacattagtctcaactaaaaaccataaaaatcccttttaaaaattttctctaatgtccttcttaatctctttttatcactttttataggactaaaaccatatcgtataatctctttaccggtgcttccaatagctttctttgcatgtgataaaatcaccttaaccgatttcttataatatttgatcaatatatatctcactgatattctttccatcacattaatctttctgtatttcatcctttttttttttttttttttttttatcttagcacattcattttaacatattcattcacactattctcacttttttccccctattgtccctttaaactttagcattcacttgtagagtatagttttggcttcatcctttgagtttgattggtattttgcagtcacaaataactatgatgcctttctccattttaactaccctaacttgtatccagtgtgtagcatttcattcattttcccattattttgtaatattgattcttgagaggaactcaaaaacctaagctttatcaacatgcctacacggaactcttaacagacccaccaataaatctccaaaaacttatagtaacttgtaaaaaggtggaattaatttttcttttctttttgtgaaaacataaatctcattaatggaagtacaaaggatgcttgtacccttttacatcccataccaaatatcataatttcagccggaatgtattagaaaagaatgcatagggtggagctatattgaatttatccaagttgtggcacattaggtgtgtttgaagccaaataatatatgaatatgaagtttttagagcttaatttcatgtatcaagctttggcttggtatatggcccgtcaaaacaatggtcggtgtcagattgacttccatgaagtatttaacaattaattatgattggctagggttttggttgtgaggctagtcgaatatgattagggttgaaaattctaaacaatagtcaataattgaaaaaaccttgttcaaatgtttggatggtgtgtttattggatttgcttcttctaaaatgagagtataaaattaataattttaatggttgatgagaaaattaatgattaatatttctaacacattcataattttgttatttatgtacatttaaaatcaatagttgatttttatttttataaaaaattaggtttaaatatatttaaggtccttgataaatgattgaattttgttgagttcttgataaatttttttcattgttttgaatttctaatatattaattttttttgttttgaatcattattgttaattaaataatgatatgacaccatcacaatcattgacaatgttaaaaagatcaatttataaaataacatgtcaatcacttaattaatgatggagataaaaattttaatatatcaaaaatttaaaataacaaaaaaatttattaagaacataaaacaaaatttatttatttatgaaaaactttaaacatatttaaacctcgaaagtataatgagttattttacctttaaagtttttactttagaggaattggatctgtgttcataacacattttctatgaactttgtgcatgtgtgccacagctttggaatacgagctgaatatttacaagttgtaagttgtatcctcaaaaagtataaccagataagaactagataagaactgcatgttgtatgggtacctaattttttagagagaaaaaatcatattattatgatacacatttttattaagataaatcttttaaataattaagtgatcaacatgtaattacaaagatatgaatgctttagtattcaataattggaagccaacaaaatgaaaaaaataaattatttaacagatttatttgtccaaaaaaaattaaataaagtaatacatgtttcaaaatcacaagagtattcatgtcatattcttaaagagaacctttgtttttattctttaattccaatatataaatatttccccaatctccactttgtagtactgtttttctcatgtcaaattccactgtcacacatttgctttaagattcaatatgagcactgtctatatatactatacataataaaaaactatcctatatccactatcttttttcttccaatctaaatgctttttactattatgcaataattttgaaacacaaattacaaacttaatttaaaatgatagcatgaagttctagatagttcaggtaagcttgcactcagatttgagttataactttgaataatttgaacacattattcacaaattttgtttagtatgaatgagatacaccaaagtccagtctttgtaaagaaaaatatttcaaatttatagactatttagccttttcaagtcctcttaccattaatggtttagggttataaggtgctgctaaccattgtcctaagggcattgattaagaaattaaaagaaaaaaatatttatttctaaatcatacaaaagtataaaaaaaatcataaacaacataattttccatttctcaataaaaatatttttattttaagttccttaactaatattcttaagacattagttgagatttaccttaattatattgtgatatatgtatggaaaactaacctttttttcacagaaggaaaaattaacttaaaaaatgataacttggaactcaagtgcattggcttttgttatcttagaatgcaacaaaaatattttgaaattgatcctctaatgtctcatgtgctatatacttaatcgagaaattcttttgtgagcacaaacccaacacatcactcttaggcacaatcaatgaaaaatttgcagctaatcagattaaaatttaaaaaatgtcaaccagtaaaataaaaataaaatataaaattcaacatttaataaaaaaaaaagacaggagagtaatcctaattcctcccaaatacgtttttagtgtaaccatcttcttcctccatctctggctgctgaacaacatttctcaagtgtgggggaagagattgtaatgcctatttctttattgtttctacaacaaattatgtaaaaatcctaaaattgaaagtcccaaatgataaaagaataaaactttatttcttagtgcacataacacaccacaagccattttcccctctttcgttttcaattgaaccctaaccgttggaagatacgacacatatcactcacttaacattgcatgcatttgtttcacacaaacacaacacctcaaatttccaatttattaatgcaatttctcctgcaaaaatgatttaataataaaaaactgcatgtgaagttttacattgatggttctattcatgaggggcacaccagggagataaatggagttcatgaccggtaccaatggagacatagtaagggaacaatgttgatcaatagtttgagagacagaggaagaaaattgtgctgttaaaaataaacgagcaagaaaactgtaaaattaattctgatcttttttcaattttttattatttacaatttgacattttttattttaatttaattacttgtatatttctcattggtcgtgcctaaggtgatgtgttgtgtttgtgtcacacaagaatttttccttaatctcattcaatattttctaacaaaccaagtgttttttttttcaaatacgaattaaatctaactagattttaaatctaattagatttttgtaaccacccgcacccccaaatcaagtaatataagtagaaatatcgaaattcatagttcatcaaggctcaattttaaaagtcagacattaatgaatgaggaagaaggatactgacaaattgaatctataaatatatgataccttctgaaaaatgtgcatgtggcggctaaatggaataatagaaaaagaagttaggttaataatccatgctttagactttatttacaaatatatattttaactttttaaattaggcacatatataagttacatatgtatttatatttataaataatccatgctttaaacttatttataataatattatataacaaacacggatcaagatcatttatgaaaagaactgcatgaatcgtcctttgatttaatgtatgaaatgatacatttgtcttttgaaatttagtttaataaattttaagggtgagatgagattcataaggcataacagcacatgctgcagttcattttgaactgcaggggatcctattcgatccaacaaacagtgtgagagtcttttcgcaccaccttctgacaattagtattttttttccttattctttttttctttttcaagagtcttcaaatgaaacaatatcattaatattctcgttaatgaataatgactacatcctgcgtgtaatttaatgttcttgaatcctagcgaaagttcaattctcagagcccagtctttagaaacttcgcgttatatatgaaaccaaaatcaatgcagaattttttttcgtacgcttgtttgttcttaaatttattacatgcactgtgttctaattgtattttgtaactgtttttatattgtattgatgaatttcatagttactcaacttagttgtaaggatattatttagataaagtttttttttttctagtgctttgttttctaataaaaaaacataatatttcaaaaagaaaaagacatgactacaatgcataggtttttgacctttttattaaaagatgacaacacgaacacctaaaaggattttatctatattttattctaattattagtgtatagtagatggcacttgactaaaagttatacagaaaaagataggggcaaggccacttgttttgtgaggggcctccccaaaataaaattactcaaagtccatcctcttgcggaagaaataatgatcaaagaaattattgtagttttttttatatcatcaaatttttcgaaatttaaggaaaccagaggaacgaaaataaagaaaactttaggaggtctttggtttggtttttcgtttttattgtcgatacaattttattaataataatgtttaaaacttttacacttcagtttctttatatttttttttattgtgaagttagatggtaaaagtaaggaaatgttattttcaccattttcttcacaaaatattaaaaacatgaaacaatataaaaataaatggcatttttatatttatgaacaaaaatatagctagaaactaaaaataacaaataagcttaacagttgaatataggtaaagaagtgccacattggaaaagaaattgacaaagtattgatccctatatgggaggacttcctataacctaggctaacctaaccgaaagtctagaataaaaaatatattagaacatgcattagagttatgttactagttaaattttatcaagataaaatattatcaagttaagcaaggtaataagtaacttatgactttacttagtttcaatggatatcactcctgctttatttgtttaacatgcatctaacaaaattaaaatttaaaacttcccctcccattttcaatttcccatttaatttatgtcaaagatggtcattaacttttgtgttagatactttggaagacattgattatatatgttctatgtattttttctgttgtttaagcaacttctggttacatatttttcttgaccatggatcagtttatattaatattgagtttcatgaaacagcatgcaggacacaattgaacgctaccgcaggcataacaggagtgctcaaacagtgaacagatctgatgaacaaaatatgcaggttatttacctctttccccttttgttgttttgcagttatagtttggcatttctattcattatctagtatttagatgctgctagaatatctaaatataaacattatattacaagatacctctagatattctcactaaggctttgtaaaatggtctcacacaggttaatatagacttctcccttcctcataatgattttttgtttaccaaacttttttggggagaataaaaaatgcatgtgcttctattgtcgtatgaaataattttaaccaaatggatagactaaccttgctccaatacaattctaaaataatgatcaagcgacttataatctgtttggaaaaaaattcaaaaacaccgatcaagagtttctctctttatgtctagcatgaatatacacagaaagtttgagaaagttacttcacttttttggcgtccgtgcgaatttgttggaggacgtggatctaaacacccacttagtactgaaaattaagggggatcttcttctcaataaatgagttcccaagctaccttaataagcatttgatgtaggcaaataaaaaagtggaagaagatatgatttacgtgaaaaataaagattgaaagctgtaaagaaaaatattaaagaaagggataaaaataatgcaagataaaatatagatgattttgatcgagtgtcttcttgtgaaattcagtagaaaaccttatttagtaaattctatgctaatccaggtgattggtagttggcaagttcagtaagttgtggtgggtccatctttctgataatggctgataattaactccttgataattaggcatgacctgcattctccaaccacttttcaatttacctttttgagcttcaaactgttagaataatcgcttcttattttagtgcaaatccgtccatttgtctccctacatgtgagataatgggccgtttaattttttacattttatttattaaatgtttttgagaattattttgaatgaaaaagcttatccagaaaatcttgttttaaaggtgacggattttgatttggcctgattacgaaaactatggaatttttggctttgaatttattttagcattgggtcattaaaagtttttaataactgtatcaattattataattaagattttattagccttaatttcaaactatcacaaagtgttagcattgttgatcctatcaagctttttgaaaaacgtgtgagtaaaaacaaagcacgttaaaaagttttgatagtcattgattctaggtgtgaagtgtcaaagtatgaagtgttataatgtgtgagccatcaaggagtcgataatcaggatgttacatttgacaccccgagaaaaatctcgcctctcttctttgggtttgagttttcacccttactagttatgtagcctcaacatatctgagaggttcctattgtatcctagagaacttgaatgagataccatgtataagtctttaaggacaatatcaaaacatgacttaggaagcaattgttcatgatctccaatactatttccaacaatttaaggttaaaaaaacaaaataattcaaaacaaacaaaagttgaaagtgcacctttcgttctatttatgtctcctaattaacttttgaatttgtaggtaaaattttcatcttccttcttttgtttcttcttctgagaagaaccttcaatatctattgctttgttcttatccttattttgagaggtcaaggtcaaatgaacactttttttcttatcccattactatcattcccgctcttgcatagtgagatataagctcgttctagaatcatttatcctttcaagtgttataactctttcaattattgaaaatttgttggtcaagatcaaaattaagtgcacaagcatgccttcaaacaactctaactttagtgccttgatttttaatgcgacattagacaagttcataatgtactctttatgtttcctttgtccttatactttaatgagatgagttttgccagaaggttgtttgtctttgtcctttcattcttagcaaaatattgctccacttcttgtcactcttactcttagtaatagaacctggaattgatttcggaatggctgttttcattatcatcaagtacatttggtttgagggatcccacctctcaattttaagtacatctatgtatttcagaataggaatgactcgttccatcctaagtgcagtattaaatccataagattaaagatgatctccatagcatctttctagactttgaaatttgtctcattcagcattgagacactattaacttgagaaaaattattctcaacactagctacataaattgcacaaaggaaaaaaaatagaaaaatattcacataaacaagatgtcaaataagacaaaagaagtaaataaatgatccaaatgggcactccattacaagatatttagcacactattgatttctaatctttggataaataaattaatttgtaagtggtattttcactgcaaagatcaaacgctgacaattgatcaggtttgtcaaacaactcattggattgactattgtttatatgaaaagaaaactttatgattgtcacttgtttattatattagacatgtctatttgaaagtggtaccaaagatgatggtgtggctaagttatgtggcaccttctaccccatacatatatgtactaataatataaggaataataaattataattaatttaaagtttttaaaacacatttaaataaaagcctttcaaaagggtaaaaggctcacattcacttttgtaacatcataaaatgacttgtccaataaatactaaaatcatctcggcttaaaacaaggtcgttcaagactttaatatagaaatttatgcccaatgtcacatcttatcagagtattgtgtctcgacgtcctttatcgtaaggttccttaaagcaattcacctagtcatctgtttttcgaacacaaggttcgagatcatcataggattcaaacacaaataacacacgaagagtgagtcatcatattcttaactaatagagaaacaagacaactagatatacatatcatataaatgaaatacaacttacttaaacataattcatgtaattccaccactgtcatttaaaattcactttttaatcatcaatcacattacacatgaatcacacactttgatcaagatataataacactcatcaatttcataataaacaattagcaagcattatgcaacagttatgctaagacccaacctatatgcaatgtggtatcatgtcagtgaaaagttatcctgggacgcttaggaatacataactaaacataccacacaatgagtgtgttaggttattctcactaagtaaaatcataaggtgaccagtcagggtcactccgttttacgaaaatgctccaaccatatgtgatcaatataggcttaaaggagcactcaaaccgagtgtctttacccccaagccttagactctgaagaatccgttagggtctcatcttcctgattcaggttcaatccctaaaataattttagcaagcagatactgctaatgaattttacaatactcatgacctcacactcatgtttcaaacacgtttaatacattgcgctacaatttaacattggttcttaactaggaacctacactttctctttaacactacgcataaatatttttcttaatataaacattgatcggattattgtataattcacagttcacaacataattattgtcatatcaagtgttaaatacacacacttattcacaatcaaatatcatacccacaatttaacatctcataatgtcacaatccaccatcaaagatttacatgtatttcataaattatcacatgttcaactttgtacttatactcaattttaacaacaatattataagcaaacattgctcgtgaattatataatattcacgatctcacactcatgtttcaaacatgtttaacacattgagctataatttaacactagttcctaactaggaaacctacatttttttctttaacactgtgcataaacacttttctcaaggtaaacactagtcggattattgtataattcacaattcacaacacaaatattttcacattaagtgttaaccactcatttattcacagctgaatctcatgttcacaatttcacatttcataaagtcacaatccaccatcacatatttacgtgtatctcacaaatcaacacatgttcaactttgcacttatatttaatctcaataacaatattataattgcaaagcaacatgttatctcacaactcatcacttatttaatttatcacttatacacaatttcaatcacaattttacaattccaatataattatttatcatgctaaatcttatccaaaacacaaacaaatcatacaaaaatatttttcaaaacactaggagtaaaatccctcaaacagttcacataatcatacaaaaagaattataatacaataaacatcccaaaataaatctcaatttgattctctaaggattcttacacattttcattctaactccaattgcgataaattcatcctttacctctaagcgagctcatgtgtgtattctgacagtgatagcgatatctctaatagtttcctgagatttctcaagtttttcctctgactgctctgatagggttcccaaacgttagagagaagggaaagggattgaagcgttcattcaactgtgtatgtgcgatgaatatttttcccttcacaaatattttcttgtaaattccaacgatgaagatgtgcggaaatgcattgcgaaccacatatcaaaatttcacgacaatccaatggttaacgagtcagggatcgtagttttactgagatggttttgaatttctgcaagaaaagaaaaagctgcgatacaaagggtatttttctcaactccgacatcttttcgtaatttccaatggtgagaatgtttggaaatgagttctgaacttggcactcaaatttcatgatgatccaacggtgaatgagtccgagatttttgtttttatgagacagatttggtggtatgcaagaaaaagagagaattttggccggagaagagaaaacgaaattgagaggagatgaggtatagagagaatatggtcatttgaaaattaatctaagatatttctatttatagctagggtacttacaatctattatttactctattttttgtttattattttataaataaatattctattttattttcgatcaaatgaataaaccaaatatctttttttcttcctataaaccattattttaattaataacatcattttttcttatttatttaattataaaaatctcatcattttctaaacctctatttttttactaattttttttaatttatttatgaaaaaatgggatgttacaagtcagatgagtaatgagacatgaaaaaacttgtgatggatctatatacgtggattcctttattgaaagttttcatggcaatgtggaggttattgtcaacaatagttaagctctagaatcatcattagatacttgtggacggaaaggattccgattgagggtgatttcatatcatgtgaaaagatattcacacttagattattggggtgcaagtttgacagtaaaaaatccaacattggatagaaatgagcatattgatcaaaacctaagtgacaatgattcacaaatctaatatcttaatattttgaattgtatttggtgtcaaattcacttgtatgattgtctcgtgatccattgctagaaatcttctcaatattttattccctcatattcttaacaatgctaattaaatatgatgaccgactcttagttgaaaaaactttactcttaaactttagtcaagattttagatgctaacatccaataacaaaactgtgaaaacctaggatgtacctcttgccatattatcaaaatatttataaaatttatataaatagctggatcaattacaattgatcgccagctattgtgaaatctctataacaatcaatcacatacaaaaaggaatggtatgtggtctctctcaaccaaattgccttagttccttaataagactgccatctctcttcctgatgggaagaagaaaaaatgttgttattgggtatatcatggaccacgacaaattggtttcttctatatgattaattagggttaatttttataattccctaataggtcaatattgccatcaactcattacattcacaccaattttagaaaggtataggttcaccaaagtacaccacataaaatgaagcccattgaattaaatagctaatataattaaacatgacagccacatttagaccagggaacgtgaaattcttaacataactatcctgaaaaaccataaattctagaaaccctccactcatgtcttgaacattcccactgtatatgcatgtcggatatgaacatgagaataaagcgtattggttaattggcatttcttttatttctatttttatttactgttttctttatcatagacaatcattcaactttggaatactgaggactgaatgaacttgtgtaatatgtggcagcatttgaagcaagaaacagcaaacttgatgaagaagattgagcttcttgaggcttcaaaacggttcaagatcttgcttttcaatccatcttcgcaacttgtttatattcactgttagatttatctcacaaagaataaaaataaaaaatatattctgtgtactattcatccctcaggaagctcttgggagaaggtttggggtcatgctccttagaagaactgcaacagatagaacaacaattggaaaggagtgtaagcaatgttcgtgcaagaaaggttagattaacaagctcataatttatttttattttaatatttcaatttgataaatacctgaatcccaactttccattattcagaatcaagtttacaaggaacaaattgatcaactaaaagagaaggtaagttattcatatagttgaggtggttggagttgaatttgtgaatgtcatcttgcatttgattttgttaattgtcagtgtgataagaaactggaatgccaatgtaaacatgttggaacttgacttcttctataaagagtatttaattccaggttatgtgatccaattagcctcattgtggcacatttagcttactttaaatttagcacttctagattcggagattcactttagagagtgagcaaaggagttatacatgtgtatgcatttaaccacaatctcaatcatttaaccacaatctcaatcattgatttttcaaccttccacgttaggtcttttggaccttatatcaaccaaaaattgaaactacaaaaagttagagaaaaacaaatttggaaccattttaaaacataagtccgattccaactggggacaactgcataggagggatctgcatgtcattaaagttgatttaatttcaactatttttctgaaaaatttagacacagactccatgtagttgtgactaattaccatctgaaactggtgttatcagaattactccttgatattttgtgtttgaatttaattctgtatcattctgagttcatgaatatttttttgtaaacagaatgaaagttgttttatttcccttaatttctaacagttggaaaaaaaatcatatcagcttggactacattaaagagatgctaactagtgtgttttgattacaatacaggaaagagctctatatgctgaaaatgctaggctgtgtgagcaggtgaaattactctactgttactgctgtctataatttgctttggatatgtttgttgagcacatgttttagatttggaggaatacaaacaatacactctaccattttcttttcaactcacattccactattaagtgaaattcatgtaggtttcattaaataataaatgaaactcattaaataggaggtgtaaattacatcatattacatcatttgtttagaacttaaatgaatttcacctaattggaagaaaaaaattgtgtcaaaaagagtatgttagtgttttcttaacatgttttttttaagattttagaaacctttcaactagactgaaagcctaataatatataactgaaattctcatgcagtatggtatccagccacagccagcaacaaaggatccgaaagaaattcaaccctatgcagaaagcagtccaagttcagaagtggagactgaattgttcattggactacccaggtctatctagttgaagataatttaatccttgcctagtatgaaataagaagcccaactgcaatgtataaatatcacatgtttcctaatactttgagatgaataatattatcgcttatattatataaagaactttccaattttatgattagggtatgcgtttgtctttcctcatttctgagctttattagttaggacgtggtaaaaattttggcttgctagaactagtgaaattaacaaagatttttggactgtatctaaaatacccttctttgttgataaaagtaataattattgaacgtttataaaatttagtaaagagtgacaatgcatacaatgaaggacaatctcatagatatcacatatagaaagttgaatattataaagtttatttgtagattaatctgaagccttttcatgtatgatagcgtgtgtttgtagggaaattagcttgcaaaatttgatacgtacaaaatatgttcgaataactacatttacattgtgccatataatcaaatttgacatcactaaatcttattgctttctttccctaaagttgacattttatcttataaggtccaatgtaaatgtttttctctaaatgaaatggaaatagttggagagaacaggattctctgaaaaagaaagatactaatatgattttgattttatgagagagaaaatataaaatagtttataaattttcctccaattcagagtcaaatattttaaaatttgtataatacccagataaattgtttaaaaacacatgaatctaaaatttgacaatagaaaagtaataagcaagacatgagttcataattgttagtattcaccaaattgttagaatatttatggcagataaaagttatcccatttcaatgtcaggatatgccacaggcctcaactaacattaattgtattcaacacctttcagttcagcaatttaggtgccacattggcaattgtgttactcctctatgaactttagtaagagaacagaattctgagaacagcatcctttgtggggagagaaggtatggctcctctccctgtcactgtgaaagcagcacaagcatttgcaaaatctagagcctccctcaatcttttctcatcctaaaaatggcagaggaatgaacactt

SEQ ID NO: 331 - DNA, 5656 bp, Glycine max
  source 1..5656: mol_type = genomic DNA
caaatttttaaatagattttttattagtcttgaactctctgtggtagatataacaaaatacaacaattgaatatatgtagcttaatgtcatgatatttgcaatcaattgcaatagctttcgaattaaatatactgcctctttaatttaagcaaatagctccctaatccctactgaatcaccgtgagtttgacaggttctgactttctgagtcctgtgttgtgaaatggagaacgcatgaaaattaaattcaagagagcttaaaggttagggagttgtgtgatttttccgattatcccacgtgtgagtcacaacacaacttgtgtagaaatgcaatgcaaagaaaggagagacgtggaagatggatttgttttatttatcgcatagtgcatttaggataagagaaaaaacctaaaaatctagagaacaaaaaagttgtggctgcaatttgcctatcaattcattgtatcttccccactcagttaactaatcctattcacttcctcttcctctctcccttcccatctatccttctcactgtgtccattctgtcaaagcctttgggctttttcgtacaactaggtagtgaaagcaacaatatacgaatttttgttgaaaatactactaataatttccaccaaaagcacaaatgttatgataaaaaatacaagcaaaacgtaataagtgccaaaacttaaaaagtcatcaacccaataatcacactgtgcttacacctatttatggcttaaaatctccctttaaacaagttagaaagaaaagccaagacaagaaaagaaaaaaagggagagaagcagaaagagagagagagagaactgaaaaaagaaaagaaaagataagactaattaacgtttttttggtttggttttcttcaacacgcaggagacacgaagtaaagagacaagttacatcagatggttaaaacttgttaaaagagtttgtgtatgtgtgtgaaagtagtttaaggttgtgggggtggttgaagaagttttttagctttgtagatagagatgtcaggtggtggaggcagcatagtgtggttcagaagagatctgaggatagaagacaatccagcactgacagcaggagtgagagctggtgctgtggttgcagttttcgtatgggcacctgaagaagaaggtcaatactaccctggcagggtctctagatggtggctcaagaacagtttggctcatcttcattcctctctgaggaatcttggcactcctctcatcactaagcgatccactgacactctttcttctcttcttgaggttgttaagtccactggagccactcaacttttttttaatcatttgtatggtaagttttctcttccctactactactttcaatattttatttgccactttttgtttcctatgataaaaaattctactttttttcaaaaaaaaatttcaacgctgcaaattggatgccctgattttgagaagtttattgcttagttgtattctgtaaacatcattttggattgtaggattctatatattatatcagttgggattatttctttatggggtgacattgtacggatcaagacacaagcatttttttagcttgatttgtttggccccacttacatggttgtctttgattgatcctccgtcaaattcactttgccatttatattcatcttttgtagtttgcttcatgacaatctaaaaataatgttaaaaggtcatgttctacttcatgatattttcgtttgtttcagttcttgtttgtgaaagttacttgtgattttctatgttgcagatcccctgtcacttgtcagggatcaccgagcaaaggaggttctgactgctcagggcataacagtacgttccttcaatgcggatttattatatgaaccatgggaagtgaatgatgcacatggccgaccattcacaacttttgctgctttttgggaaagatgccttagcatgccttatgaccctgagtcacctcttctcccacctaaaaggataattccaggtctatttttgttcacttctttcctttgcctcagttatctcttaatttcattcctgatatagactagttgccaattacataatgttcaatttgttctttcctattcgttactgaacaatgatctaaattggagaaaaaacaaaactatgtactctttgaatgccacttgctaagttgctatttaacataacagaaaggtgaaaactataggcataatatttaacaatatggagttcattttagatgaacaaatttatagttacatgtgcataatttaccaataggcgttcagatatacatattcaagaactcatttgaagtgttcaaattttgcttctgatataaaaaattcccctagtctgcaacatctgaggcattgttcattttccttgtcctaatcaggctttactgcaatttgcccttgttgacaactcttgtcctatttcaggtgatgcatccaggtgtcctagtgatacattgctgtttgaagatgaattagagaaggcaagcaatgcacttcttgctcgagcatggtcacctgggtggagcaatgctaacaaggcattgacaaccttcataaatggtccactgattgagtactcaaaaaaccgcaggaaagcagacagtgcaactacctcacttctgtccccccatttgcactttggtgagttgagtgttaagaaggtcttccatcttgtccgcatcaaacaagttttgtgggccaacgaaggaaacaaagccggcgaagagagcgtgaacttgttcctcaaatctataggtcttagagaatattcaaggtacattagtttcaaccacccctacagtcatgaaaggcctcttctaggccaccttaagttctttccttgggttgtaaacgaaggctattttaaggcatggagacaaggcaggactgggtaccctttagtggatgctgggatgagggagttgtgggccactggttggctgcatgatcgaatacgtgttgtagtttccagtttctttgtgaaggttctgcagcttccatggagatggggaatgaaatatttctgggacacccttttggatgcagatcttgagagtgatgctcttggttggcagtacatatctggtagtctccctgatggtcgtgaaattgaccgaatagataatccacaggtgctgttacttattatgtgtaaaagctacatatttcatctttgtgctgaccttttggatttatgatcatttgattgcatgtgcatgcactctctcttcttttgttttttctctcaacttcttcctcttgaaatattcattccctctttttacttgtgaatttggtctgatatatgatctatcataactaatacaaaatttatcaagtttttcttcttaatttaattttgtttagattactacctgcccgtgtctgtgttcctccaactatagagtcaataggattgaattttgagtttgtggttattgacattggttttgaggttgagttatgtcctactatcagcaatttgaatgctgaaaactgatagactttctagtaatagatacactcatttaaattgttgggttttgtagtttgagggatacaaattcgaccctaatggagaatatgtgcgacgctggcttccagaacttgcaagattaccaaccgagtggatacatcatccttggaatgcaccagagtcagtgctacaagctgctggaattgagttaggatcgaactatcctcttccaattgtgggaatagatgcagcaaaaaccagattactagaagcgctatcagaaatgtggcaacaagaggcagcttcaagagctgcaatggagaatggaactgaggaaggacttggagactcttctgaatccgttcctgctgcttttcctcaagacatgcaaatggaggaaactcatgagcctgttaggaacaatccccttcctgttgctcggcgctaccaggatcagatggttccaagcatcacttcttccttgttgagagtggaagaggaagaaacttcttctgatcttcgacactcggcagaagagagcagcagagctgaagtgccagtaactgcaaatgcacaacaaaatgtaggagttacattgaatgaacggatgctgcagaccactaataggaatgcacaaacacaatacaatactacaatggagctgagaaatgtagctgaagattcagcagtagaatcttcaagtggtaccaggagagaaagggatggaggtgtagttccagtatggtctcccccagcttctagttactcagaacaatttgtaggagaggaaaatggtataacaaacagttcatctttcttgcaaaggcatcctcagtctcaccaaatgctgaattggaggcagctacctcagactgggtaagatttcccaaaccaatgaaattatgaaagcattgatgtcttatatatactgcctgttctgaacatttgaggaacatcaaaccaattgtcaaagttctgcttgaagtttatgttctatatttaatttaaagattgtgatcccttttaatttttgttgactccttgttatcttatcagtgttaaattttgatcacaggtaattcatatctaaagcaattagactagaagcaaggaggtggaaattacactaccacttttctgttgagagaaagtgaggtgttgaagccccattgaacatacatgtgttaatttccttctcctttaccaccacctgacctccaatgtgtatggaaatttcaattcatacggcagttcatctgcagtcccttctgctttcttgtacaatatttgcaacttgctgtatagtatagtttgtgtagtgagggagaaagagccaccataggatctttggtctactaataaactcagatttaaaatgttacatctaaaaaatactatttatttttatcaaagtatatttatataattttatttatattcattttcttttctttcactttctatataaccaaacaaaaggaagtaaaaatataactctctttcttactaaacaacctaaataatcatttcagtttctattctttttctttcctgcttcattctttcttcactttctttttacttcccttcctaaagcataccaagcaagataatgactgattaagctcgattaaataacattaagcctttcggagcaataagttaaatacacaccagtagcatatttataagataaatgtttgtttttatataattaaaatttataataattttaacatattttatattttgaaattttaatgaatgatttaaattataatataatgtttttaagagaaattataatctaatgttacttttaactattaagaatttcttttaaaaaactactaaaagagataaaggattaaaaaaatcaaccatacagattaaaaaaaagagtagtttaaaatgtttgacagggaattttttttttattatatatggaggtaaggagtgaaatatatccaggaagaaaaaaaaaagatattgaagatgtagagaaaagtaaaaagtctcattattctccaaattgtacttgggaaagcattccaccccctagacatttttccttatgcttttttgtgtgaaaagggaactataatggtagtagcctcactaatagaaaaaatataaggcaaagacc

SEQ ID NO: 332 - DNA, 7560 bp, Glycine max
  source 1..7560: mol_type = genomic DNA
tctgatgtcaagttccacttaaaaagataagttagaaaaaattactttttaattaaaattgatataattaaatataatacattaatcttaattaatgtatcatgtatttttttcttatatttgagaagtgggagaatatgtcactattttgtcatattccttaacatcaatattaccttattaacattattactcgataatggaactaaaagtgataacatagataaaatttaaagacaatgatagatcaaaatttaagataaggctaaaacaaaaagtaaaaaaatgtttagggaaaaaagataataaacccaaaattattattattatacaaatatgtgttgacttttattattattattattacagaaatttattgtggaatagatttagattttattgataaaaaggaaagtgataggatattttggacatacattaaacacattggttctgctcttcatttgggcggagtgagaaagatctgcaggtgacgtggccggctccctttctctacccaactatccagaccacccattccctctccccttttctattgcacttttctcccttccctttccacgtctccctctcccctacgccacgccccgtgcgcactgcgcacccccctaaatccccgcgcacgttagctcaccccccttccttacttaataattccaatttagacactgtttttcgcactcttcccttcgccgactcctattgactcaataataatcagccaccaccgttttcttccccctttcctttaatatctgctaacgtgcgccgcctaacggtgccctttgatctccctcaacgatgttgcagttttatcggattgagcaagtccagggttcgttgtgagaagaatttgatgagagtttttatgaaagtcctttaactttgataataggggtagtgggtgatgagtgagtgagtgagtgagtgagtgagtgattttgttcttttttttttaatttttttttgggggttgggtatggagtctggtgaggagattaatttgaacatagagagtggtgggaagagtggtggtgatgggttcattgataggagtaaggtgcggattttgttgtgcgataacgattccaagagttctcaagaggttttcacgcttcttttgaggtgttcttatcagggtatgtatgtatgtatgtatgtatgcacggattattattattattattttctttgactacctattgatttttgtttgtgggtaattttttatccattggaatcgaagacagtttcaggagatttacaataactgacacactaattgagctagacgtcgttgactttgtttgtgcgtaataatctttacttgctatggttatgttatgtcatctttcaaactccgaaagaaaaaaaagagttttgtttttcggggcattatgttgtgaaaaatgatttaattatttaatttgaatttgttgctaaaacgggtactgtggattcggattttgtatgtgagttggcaacactgtgaaaaggaaggaaacagaaatgcagaatgcagaagcacagagagggggcagagaacagagaagcttaagacagagaaggaggaaattgcttatatttttcatatcccattctgtcaatacactacatatatatagttatatgtgatcactacaggacaaaagctactaacagaatcctctgggcacgcataggatgcactagtgctcataacagaattgagcactactactactaacataatggagtactaccaaattgtgccaaaatcccctaaacataatcctttaagtgctgaggtggtttggttttccttttgggtctgtcaccatgctcttgctgaggtatcacctccttttgcctatcagaaaggaagaatgatttagtcatgcttgaatttcattaagccaagtttgactatcatcgtaccttttgaaactcagtttgtgttctttgtgctaatgttgactgttgagtttcaatgattggttgatgaacataacggcaagagggatgtttggttgcgaataagataagatgggtttgtttaagaccttgcagggtagttgcttgttgcaacttttacatgtataatcattataaattctagattcttaattcttctattgtggtttagtttcaggttcattttttgttttgatttcccctttaaaagttggtagtatgaacttgtggagaagttttatctgtcactgaaaatgccttcaagtggtgattttgttgaatgctttatgataacctactgtgtgatgatgtagtttagcttgtttggtttaaaggccttgcaattaatttatgacatgcttcctgagattttatatatttataaacctcttgattttctctgcttcacagttaccttggtaaagtcggcaagacaggtaattgatgcactgaatgcagaagggcaacatatagatatcatactggctgaacttgaccttccgatgaagaagggtatgaagatgttgaagtacatagcacgtgataaagagtttcgcagaatccctgttataagtaagcttgtgttctttattttgctaagaaaccagtgagactcttgaatttaagcaaattatgttctgctcctcatcaatgttttgaatatcttgttttgataagtgatgtccgcacaagatgaggtatccattgttgttaagtgcttgagacttggagcagcagactatctagtaaagcctttacgcactaatgaactattaaatttgtggacgcacatgtggagacggaggcgcatggtttgtattggtcaacttcatatttatggatgttccccattttgtgttctttcatcctattattagtttttaacccattgtttgtaaactttgggcaatatgaaattgatgccgagttaccatcacagccatttattcttggaaaattatgttgtcaagattcaagaatgacacatgaatgctccttagttatatgtataagatactatacataattttttgatatactagatgagtaaaatatatatcattttgaaagttttttatgttaagttttgaggttgatctggccaatctactttctactaaaagtttctaggtttatgatttggccagtcatttttttattttttatttttatcttttttatataacaaaaccatttgtctaattttgtatggagctactataggagatgcttaagattttgcaagaaccacattgcataccatttatcaggctacctcatctgtgcaacagtttagtggcaatgccgaacactgttagttacccacagtttatgtctgctactgtcacagagacattatttatagttagtggtttcatttttgcattgcatgaaattatgttcattaagttttttcagatgttaagaatatggattttggaaagaactaggggaccttgagttaactggaggtttcatatggaaacactttacatggatgatgaatctaccatacaatgtacataggatataaaatgttagggtggcctctcccctttgccccagctcattctgctctttgcatataaacattcatgaaacttttctctggatttaccaattcattcttaggccttcccaatttgaaattgtttcatatctattctggcagcttggacttgtagagaagaacatcttgaattacgattttgatctggtagtatctgaccctagtgatgccaacacaaacagtaccaccttgttctctgatgacacagatgacaagtccaagagaagcactaatccagaggcaggaatatcagtccaacaagaacaagaggtgaatgttaaaataaagtatttaaataatgcaagaatttaataagcaatgggatcaactcacgatcacagatcaataaatgtgtgcatcatgctaaacttttaaattaatctatgaaaggtgggtttttttattcaacttggggcgtactttgcaaataattctacctttcagagtataaactttgacatcgacatgtaagttccatattgcctttcaatgttaaggtgacatcaagtctggctaataaataaatcaattccctaaaaccaattttaagtagcatgggtgtgggcatgggcgtggaaattgtaaacaaaacctaagtgatactttgaaaaatattatttaggacccaattgcaaggtatgggactttgagtcccacattggaatatgggattctagtgcgggttttataaggccttgtgctctccaactagagctagcttttgtggtggggttctcccaagtttcttatcatttaactttaaccttttgggttagttagtttataaaggactgttgccatcttgcatgagggggcatgttagagattatagatgtagtgtaaaaaccagtctttacctaacagcttaagcttcttgggtagttatgcatgatacagcatgctgaaaaatgctgatgtgccccatgcacaattatgtatagtgtcattgggttacatgtggagtatgaagaaaagtggtggtgtgtctcctcctcacagatccaaaggggtgtaagtgtaaatgggtttagatgtagcatttctctaataccttttatcagctagcaatgagcagacatcattatatgggtgtttaagctatgggcagacattattatatagctactaataacttcaaattagaagtgttgtagtatgtggtcatttatgcatataatttatcttttcagtctactattgcaaatgctgctgctgttgagggacctccagatgctcatgcatcagaatgtgggcctgatgtggatggagttaatgatcaccaaacaggtatgcttcttttcttcatttgaccttttcttaaaacccacaaattgatgttgatttttgcaataaaaatgaagttatacagtgtagcaccaactagttctgtagtaagaacttgttttgaataccatataatgacttaaatggttacaaatttgctgaccaaaaaaaaaaaatggttacaaatttttggttttgccgtcattctcaccttttagcccgtcttggtctgtagaagtatatctgtttatgtaacagaatcacttgtttatgacttgctttttatagctccataatttttaatttctgaaaatggcttcaatctgaatgggaatttgagttcctgagtttgaacaaaattcgacttatgcaaatacccatttcagttctattgttttctctctgattagctgtaattttgtagcacatttttcatctggtccgaagaagagtgaactaaggataggggagtcatcagccttcttcacgtatgttaaagcatcaatacttaagagcaacttcgaaggggttgttaatgtagacaacaatggtgctacgcatgttgggatggaagttatgcatcaagcatgtgctcaacaaggggtgaatagccttcaaatactggaaaatggagaggcatgtgaaagtcaatcgcaagatgacttacccagcagcactagtattcctgattctttgtctattgagaggtcttgtactccacctgcatcaatggaagtttcacagcaaaagcactacagggaagaaaattcacaacagggtgtgatgcatcccagaaatgggacccattgttccgagcatgaagtatctggcatggcttcccaacatgcttatccatattatatttcaggggttgttaatcatgttatgatgccttcatcagcacaaatgtatcatcaaaagaatatccaggacctacagaatcatactagcacagctatgatttcacaatacaatcatcttccccaaggcggtcctcatggaacggggatgacatccttcccatactacccaatgagcatatgcttacaacctggtcagattcctaatcctcattcatggcaatcatttggaaactcaagtccatcagaagccaaattaattaaagttgataggagagaagcagcattgatgaaattcagacagaaaaggaaagagcgctgctttgataagaaaattaggtacattaacaggaaacgacttgctgaaaggcggcctcgtgtaaggggacagtttgtcagaaagttgaacggtgctaatgtggatcttaacggggagcctgcatcaattgactatgacgaagatgacgaagaggatgaagatgaccagggagcaagagattcttctcctgaggatgcttgagcatgtcaaattgctattttgacttaaggatgaagggccaatcaattccttcttgcaactaatattggctgtcaaaagaactccttgctttggaaagttctcaccaaagcatcaatttatgagcttgtgctcatgtatttggggtgttgatccaatatgcacatttatggttgaaacgagctcattctggacattttttaatagcagttcatcaaatgatccgtactattgagctattgcgtaaggtattttacctcctggtggttatgtccaattcagttgaaagtatcacccctgcgttttatattgaatccgttacaagcaggttgttcctgcttattttctggagaaatgtcaagacatctttaaaaaattgaactgagaaatgagttatttgtctaaaatatttctttcaaaatttgaccaccatccaaggcatttcgcctccccaattttctttgtactttttttttctttttgtttacccggttgatgttagttcaatttttcggcacagtgaaatttcagaactacccaaaacctaacgtaaatgtttccagagtaaaacctattaatttatatattatgtaagaaatcgataatgaacgaagcatctaaaactgaatgatcttacaaaattactaaaataattatatttaaagttttatgtcaagtgaataaaatttggcctaaataagaaaaatagtttacgccatttttaagtaaaaattataagtatcttagacacaaataataataaagtaatattatgcatatcatgattgcttttggaaaattttaattacttaggacttaggagaggaaagctttgaaatttggtaatctattactatgtaaaagcaagatgtattgatgagacacttttactattcatagaatatattattttttatttaattatggttcgcttatttatatattgaagttgttttaaagaaatattaaaaaattatatttattgtttgattattgggcacacgatatttattaattttatgaagtaaaaaaagacacaatatttattaattttggtgcaagataggtgtaatatataatttatgaagtttttatattaatcttttgtacaatttcattgtaatttgattgattatttaataaattgtaataatgtataatttttttaaacaaatcaatacgctattgcaaaaatttatatttattattatgtaaaaccttttttatgttattagtgttaatttaatgtatttaattaaatgtaattttaattattattatgtaaaacatttatatttaatatgttgatctttaattctagtaggaattaatcttcgtgctattgtaaatagcaa

SEQ ID NO: 333 - DNA, 4560 bp, Glycine max
  source 1..4560: mol_type = genomic DNA
acgttttcttttattgaccaatgggtgtaacaactctagtttaattttgggcaactggcatatggaatatataatagtgatgacacataaatatcttttaatgataaaaaaaatttaagcagacattttaagataagagactaataagtaataataagtgctagagatgttcttctaagtatccagagactattttataaaaaaatcaataaaaatagtaaaaaatatatataaaataaaaaagtggattgaaaattacaaaataacactttttttttataatttttcaatcagtgttcttagagagtgttatgttctcaaagatatgtgcatgtagcagctgtaaatgaaaataatccaaagcaaaggaggtgacgtaggaggtacgtgaattggccaatgagcagtgcatctaagtcaagatatgacccaattcaatatttcaactccattgaagtaccttggggagggaaggacagactctgagtctctgacacatggctaacttgcattgtcttccaaacaaacaacaagccaggcccaacgtacttcatgttaatcgtaactatttctcctgcaatgcaagctggctccgcttaataagttttaacacaccttttcctaatataaaaatacattaaataatactattatattgttatcattcctttttaaacttgttaagaaacatagatatgatatgatataacacgagtggtagtgttagtgttaagtgttatcctaagtaagaaatgagagagagggtaacaccttccccaaccctaaaaggggaccaccttaagagcacagccacccaaaagatagataatgtcccagctttagacaccactaaatttccgccacgtgtcgaacagagattctccggctctctcaacgccaccaaaaacagcaacaagtaataagtaacaacaccattcactcactaatcacaaagtcacaaacacattacataacaacacttccttccttacttactttatttcttttctttcttctcttcatcaaaacaccactctgacaacattaactccccgaatgttggatggagaagcaacaatgggcacgtgggctcgcatgtgcgacacgtgccgttcggccccctcctccgtgttctgccgcgcccacaccgccttcctctgcgccacgtgcgacgcgcgcctccacgcctcgctgacgtggcacgagcgcgtgtgggtgtgcgaggcctgcgagcgcgcccctgcggccttcctctgcaaggctgacgccgcctccctctgcgcctcctgcgacgccgacatccacgccgccaaccccctcgccagccgccaccaccgtgtccccatcctccccatcgccgccgcccccggcaacaacgacaacgacaacgtcgacgatgctgacttggacgacgatgacgaaaccgcttcatggctcttgctcaaccctgtcaaaagcgctagtgtccctaacaacaataacactaataatgggttctcgtataatggtgaggttgatgagtatttggaccttgttgatgactgcgacaaccaccactttgcttctgttgctactactacggaccattactctcatcagcaccaacatttcggtgttgtttctcacaagagttatgctggggacagtgttgttccggttcagcaccaccagcattttcagcttggcttggagtttgacaactccaaagctgccttcagttacaatgcttctgttaatcaaagtgtaagccttccaaattcctttttactcttcttctctttttgttttctatcttttcaaaatacggtcaacactaaaacgagaacacttttccactagactcaactctctaatgggtggttttgttttgtttattcatttgaacctcgctaagagcatgtttgatttgcacttaaaaatgattttttttttatccgttggcaatattacttttgtctcaaaagtaattttgcaactaattcattcatctaaatcaagctcttgagtgggggaaattggtgtttttatttaggtttgacttgggatgtggaaaatactattatatactacatgtttcttcttttggggtggtggttttcttgcttttggtcttcccatgacatgtttttgccaaagatggattcacaattaagtagtttcctttcatggcatgttcagttcaatgccaaattcaactttctggttcaagttctgttcactttgtttttgacctggtttatctacataatctgtctttgttgtattgtttgccattaatttgacttgttccgaggctcgcgtttcatgtttggtttaatttgtacagaaatggtgtctcgattcgttctccatcttttttatgctctctttacccttttttttcttttcactttttctctttagtggaaggaatctatggccaaattaagtatcatgctttcttgctatgataagatagttttcctcaataaacatataaaaacattctgccctttttgtgtttttttattttgtttttcaaatgttaaagtagggatttggtcgtttttcatttttttctatatccgatatggatgcagttgcctttccttcattaaaatttattctgtagtatattccttaatttgtgtcctttttagtttaccaagcaaggagctaacaagctgtgtcactcacttgcttggtccaaagccttaaaacttgtatagatgttctttctttgtcaagaaattccctctacttgttcagctgattccatcagttgtgtagttagctagaatttgtagtaccaaatatacaaaccagaacctagaatcaattgttatttgtgaaatgcctgttttatcaaatggtaaaaaaaaatgtcaattattggtctcatcagcatcatagatatgactactggtactgcttagaaaatttatcttgaactcgtgaacatttattaactagtatctgtttcctttttcatcgaaatcaggtttcagtttcatcaatggatattggtgttgtacctgaatcaccgatgagggatgtctcaattggccatacaagaacccccaaagggacaattgacctattttctggacctcccattcaggtgccttcccatttttctccaatggacagggaggccagagtcctaaggtacagggagaaaaagaagacaagaaaatttgagaagacaatcaggtatgcctcaaggaaggcctatgcagagactagaccccgtataaaaggtcgatttgccaagagaacagatgtagaagctgaagtggatcagatgttctccacaacactaattacagaagttggatatggcattgttccctctttctgaatatgctgtgttgaacaaatggccacaagatatcgaagatgctagaggatcatgatcaatagaaatggctaccacttgtgtactaataatgtattttttatgtaatctaattacttgcagttgtactaatcggatgctttattattttgtttattgtcttttgaatgaaacttgtacttgtaaatacagtccatgtattaaattattaaattacagtcaacatatctttgaaaaaaatttattttctcaatttctatcatggtgtgtaattgctagaatgataaccaaccaataacttctatttgtgttatttggtcatttcgtttaggtacaatttcttcaatcaaatttaagtattgaaccgaaattaagggaccgatactaattatcttcattaaacatcattcaggtacactgaacttgactgtagtttgagttttggttgtcatactcatgatcctgatcagattacagtaaaaagaggatagaaatttgaagaaatgaatcataacgcatataattccttaatcatttcttttcccttggaagaatgtcaaaggccaaagcatgttaattatacctatgtttctcttctcttactatttatgtttgcactgttcatcattcctctgcatataattcccgtatatcatcgagagatcatgatgacttttgagttttgacagatttagctgaaagtgagagttctaccttggagaaaaagatgcatttataatcattgattagaaaattaatgactaagattgtaacaactttagagtttgttatacatagtcgtttcatttaatctcaaatgttgattttctaattaactgttgtaagtgtactttatcctttaagtacatgctcaatttagagaagttaaatgtgctttcatagcaatataacatattctaaaagaaggaaagagatgttgtacgatgattgtcttcggaccatatatgccatattaatttttgaaaagttctgcacaattgatgatgtatttatcgcacaaaatgcatgaacttacctttaaccttcctcctgattattttaatctagagataatttggacttggaaaatgagaagagattgaagaaacaaataaagattttttttaacagtgaaaccgtggctacgggctgggttgaagagatatcatggtaacgctttaatttccatctcaaatgaaatatagaagacatgtaacataaga

SEQ ID NO: 334 - DNA, 5039 bp, Glycine max
  source 1..5039: mol_type = genomic DNA
aaatacacataattatatcttgtgattttttcaaacttagccgctaaacattttattttgatggtgaaaagctggaaatttaatcagacaaaaaggctaagccactaaacatttggaacttatcaaacccaatgacagtataaatttaaccgcgcaaaacacacttttatattaccgaatcaatatacaatattttattttaatgaatcaaattctaaatttcgaccctcataaatttgttttgcaattaacttatcaaattcttttttttttttgcactttaatcatatttttgttttgctatgtcatattgatttaataagagcttttatttggtaattgataattatccatgtggtcataattttgacgtggatggatatttatgtgtaaagcgaagaagacatgactacgtgggagcaactttcaattttgaagatatttaaacaaagacgtttaaaatattatttttcatatatctcaatacgtcttgaaaataactctttaccggaaggagaaataatttcatactggacaaactctttattattaattcaagtaaaaaacttaataaatcatgaatttatattaatttttaataaatatccattgataataaaaaaaaatatttgaaagaaagggtgtgagatgatatttgtcttgatttgaaatagaataataagaggtagttgttgcagttgttagattagagatatccattgtaaaaatatcttcctccttccattcctattcctatgacgtggtcggaattcacttgcagatatttttctatcaaacaaaatatcatctcattctcaggttagtgttccccacgttgactccattccctcttcatttgacccctcctttcccccacaaactacgaaactgccacagccccactcgtagtaattcacgcctctcccgggggcatttccgtcacaccactccaacatctttaatattgtcagagaaggaagggaagcagttgtgcagagattgttgaatcatcacatggctgtgacaaaagagaaagaggatgttcggaacactgggaagagattgaaatgcatgaggaatgaagaagaagaagtttatgaagaagaagagagtgagcttcctttaaagccaggatttttcttctacccaacaacacccacttcctttgttgtatctgatgctcttgaacccgattttcccatcatatatgtcaacaaggtctttgaaatctccactggatatcgtgctgacgaggccctcggtcgcaattggtaaggattttcttccttttctctctcgtttccttttctccaaattctgacccttttaaatctggggtttcgctcttttgtgcatttcactctaatttttactttattgggttgaaaccctttttcgggtctttcaaatgattctgttctttcagatctatgcttcagttgaagttttggatgttttccattgtgtcatctagttaagatgcggggttctattgtatcaaaattcattattctgacggcttttgcaagctacatttttactgaattatgaatttggttgccagataagtaatgttttatccctcagttgggtatttttcgacaattttgcattttctatggttagctcttctattaaacttcatgtttctccatttctatgattttccaagctgaagtattttttttcactcttttttaattcaatccttttggaacccttgtttttacttttttacaatatggttgcatggtgaaagttgtgatcagctgagcacttctaattttccttgttagtgtcataattaattttcagcgaaatttacgaagtatccaatccaaaactaaatataataaatattcaaatattgtaaaatatagattttcctctgtgtaaccacacacaaaaaaatagtagaaatgtgaatgatttactgtttgaggaatacctttttaagtttgatttttaaaaaaatgggtacttggaattttatgatacaatttttatcatctgtttgggcctgttcttcaactgcctctgaaaaggatttttgataggaggatattgattaaatatgtgactttcctattgtcaataatatagggaagctagctagttaagagtttattttcttttaaatccttcttccaattccttccttattcatgtaataaccgcagattgatttcctttatactgatttgggtcatttttagaaggaaaaaaagtcccaataattgctttgaaatttctcttgtttcagtcggttcttacagtatagagatcctcgagctcagaggaggcaccctttggtggatcctgttgttgtgtctgagattagaagatgcctcgaggaaggtgttgagttccaaggtgaacttctgaatttcagaaaggatggtactcctttggtgaacagactgagacttgcgccaattcatgacgatgatggaactgtgacacatgtgataggtatccaactcttttctgaggcaaatatagatctgaaccgtgtctcatatccagtcttcaaagagacttgcaatcaagattttgataagactggtaaatataatcctaagagtggacaatcattgtacagtcagcaccaagagatgtgtggcattcttcagctttctgatgaagtcttggctcacaacattttgtcacgcttgacaccgagggatgttgcatccattgggtctgtatgcaggaggatccgtcaattaacaaagaacgagcatgtcaggaagatggtatgtcaaaatgcgtggggcaaagaagtgacgggcacattggaactgatgaccaagaagttaggatggggtcgtctgactcgggaacttaccactctcgaagctgtttgttggagaaaactgacagttggaggtgcagtggagccttcacgctgcaatttcagtgcttgtgctgcaggaaaccgacttgtattgtttggaggtgaaggagtggatatgcaacctatggatgacacttttgttctaaatcttgatgctaaaaatccagaatggcgcagggttagtgtgaaatcatcccctcccggaaggtggggccacacgctctcatgcttaaatggttcttggttggtggtttttggtgggtgtggtaggcagggattgctcaatgatgtgtttgtgcttgatttggatgctcaacagccaacatggagggaggtttgtggtggaacaccaccacttcctagatcatggcatagctcttgcacaattgaagggtccaaattggttgtctccggcgggtgcacagatgctggggtacttcttagtgacacatatttactggacctcacaacagataatccaacatggagagaaattccaacttcatgggctcctccttctcggttggggcactcactctcagtctatgggaggactaagattctaatgtttggaggacttgccaagagtggacacttgcggctacgatcaggcgaggcttatacaattgacttagaagatgaacaaccacaatggaggcaactagaatatagcgcattcacagggttagcgagtcaaagtgctgttgttcctcctcctaggctggatcatgttgctgtcagcatgccttgtgggaggatcattatatttggaggttccattgctggtcttcactcaccatctcagctctttctgttggacccctctgaagaaaaaccatcctggaggatcctcaatgttcctgggcaaccgccgaaatttgcttggggtcatagcacttgtgtggttggagggacaagggtgttggtgttgggtggacacactggggaggaatggatactgaatgagttgcatgagttatgcttggcaagtcgacaggactctgacctgtgaagtgcataaaaccagaccctcttctctcaagacaagattttggttgcaaaaaggttttgggtggctttcctttagcagtttggtttttgtatatgagccactattacatgattgttatatgaaatgacgtgtgtattaccagtgtttttgaatgatatatgatgtcatctggctcctctgtacatcatagagttcttggctgttgtatcatccctcctttttcttttacaattagttttgttaataattaattcatttattattatttttttatattaactctgatatataatattacgaagaaacaaagaaactggcgggtagattcggaaagaaattcaaggaaaaatagttatgcggattaaaagtaaatgaaggcctaaactttagcctatagcgaagttataagctctcgaaatttaaccattgcacaaaaattataggctcttgctatttacacccttgtttttccaagtacatcccataccccctccctttctacctccaattatccattataccatttttcttaaagaagtaatcccttttcctttctaaaatcacatatacttattccagggatgtatctccagaactatgattcatagtttcagagatatatttctggaataagtatgtatttttttagtaaaatatcacttaaaaattaaaatagttggcgaaaaattaaaaaaatgataaatacttattttatatccatatttgttagtcttattttcgtcttatcattaatgttctttaaatattatctaaaatcttattttcatcttatttttattattctttaaatcctaatttttaactaacttcatcatatatttattatataataccgtattttcatcattattatataatattttgtattttccttcatgtgacaatgcaattcaaggtatgttcatcactaatttcatatgacattgaaccattgatgtagacttgtattagaaaatgcatgaatacacttaaaggaaagaaatcatcgtcaaaagctttactttgtaattaaggtgtataatatatgaaattagtgatgaacataacttaaaatgcagtaccacatgaaggaaaacacaaaatattgtataataatgacgaaaatacagtattatataataaatatatggtaaagatagtttaaaatta

SEQ ID NO: 335 - DNA, 11462 bp, Glycine max
  source 1..11462: mol_type = genomic DNA
aaaacaagcataaattaaaacaaacataataataaacataatctgtctattattctgaaatttctaatgtgacaatacattactcaaaatatgagactcaagcaaaaatgcacatccattaagttaatcattccaaaaaaaatccttaaaaaaatgagattcaatttgatttttttcattacctaatgttgtcacaataaaaattttaaagcaacaaacagattatatgcttattaatcaatgttgtgtttattattatgtttgttctaacttatgtttgtttttctatttttttaagtttttattgtaatattatgcttgcaactattaaaaaagaaatagaagatcaagattaaattatattttgaataaataaccattttctttctttaatgtattgtgcgctgacaaatttgttccttaatgtattatgtaaattctttcattaacgttaattgatgaaagttaattgataaatgaattcatcatactttttcattttcaaagattaaaatttgaattttcatattttgggaacgaaattgtcgacactctacaatttagaaacaaaatgactatttatccttaaatttattaatataataatttcatttaaagttcttgtgaagtatattagcttaaaaattatgtaattaactatttgcaatggtgacaatgagatttgatatttcatcgtgtagttgttttattttaacacataatagattattaaaaaatataaataaacatttacactagtgaacaagttatataattcgcacagataggaaattttaaaatctaaaagcaaacaaaaattgctgtttatggtgctaatttgcacctggaaagatgcattgtttagctaaaacattgacgtcgagtacttggtttgggcaaaaagccattcaagcttagctggtccttttttccttcttcacaaacctctctctctctctctctcatgcactccatatatcgtttcaaagatacacaaacaaagtaagggctataaataggagggatagaagtggaagaaagtctatagcgcagtttcatttctttggattagaaatttttcccaaagctgatcgagaagccagccaggccaggtctgtagtttttctttttaatattaattcattcttgtgtgttcttcatataatacaattagcccttcttcatctcatgaaagaaagcaaaaactcatcgcaagctcgatcattttcctatacttcattttttatatatgaagggtctcatcattttgttctcagacttgcatctttttgtgctaaaacaaaaagggtctttggtctaatttcttcgagctgagaagaagatgcacttcacaagggtttttataattttccttgatccaaaaccactgacacatacatgatatatgcttacaaacaaaattgttttttttttattaatatttttccttgcttcaagatctttttcaatattaatttcgttttccggccagctctttttctgatcaacaaagttgttttaatttccttgagaagcatcttttatatatttacaagatctctagtttcattgactccataaaagaaaaatagaattgaaagttaggaattaaggatctgagtctgatatcattcttgttcttagacttgcatatatatatttttgtgttaaaacaacaagggtcgtctttggtctaatttcttgcggtcgaggtgagagatgtagttcacagttcacaccctagagggagtggatggattttgttgtttttcatataagggcaaagaaagatagaggagctagctagctagcgagcttcaaaactcaaaagcactgacacatacaaacaaaaagatctggctttcataaaattgagataaaagtgcaccgtctccgaatcatgtttataatattatcttcattagatcttgatctcatttttcatctgaaactaaaagaatatatatgtgcctttaccctatttagctatatgcacacacaacttgtcacatatcatattttgttcatcaagtttataattccttatctttgaacttacttacatccaagtaaggtctaagctagctggagttgattagatctagctagctagttttcgatctgcttaatttgttttccatgatctcttatatatagtaattttatttccctttaattaattaagaaagagttgaagaagaatgggaagggggaagatcgaaatcaaaaggattgagaacacaacaaatcggcaagtgaccttctgcaagagaagaaatgggcttctgaagaaagcttatgagctgtcagtgctgtgtgatgcagaagttgccctcatcgtcttctccagccgtggccgtctctatgagtattccaacaacaagtgagttccttcaatatttctattattattattattctcttcggtagaaaccaaatgtttttgtcacaagttttgcaaccccactactatacgtttatgtacacttttgcatgactgtggtctgttatttacccgaagaaattctttttcagatgaactaataattggaactgcagaattactcgtcatctattatgattaaaatggttaattaattaatgattacattactacaataagttgccattaattcttggtcggtctgcgtagatctaggaaattaaaatgtgtatgtgccagtgaactagctgggatatccctttataagattttaagaaaatagggataaataaataaattagtgttctatcttctatccctaattcgaagcaattttatttaacttgtaaagaaacttagggtttatgctaactaataattaagtttaatattctttattacggtacttcttaattacttaaaaaggaagtactttctattaaatacttctatttcttttttagttttcaaaataccaaatatttttatttttgtagtttctaaaacaaatttttaactaatatatgcattaaaagcactcattactaaaagaacttaaagctttgcttatcatttagtattataattggaagcttctcattctgtaaccttttctctatttgggtagatgttcatttcaaggcaaattcgaaatagttctgtcttactgaacaaatttatttagtattcaatgaaatggttatttgtagttaatattacagcgtttttactagttaaattacctttaactcatatttgaggtcatatgtaaatcgataccgaaataaaaatgaaggtagaaagacgataagagggaccaataaatgttttaatgtctattgattgctagaaagagactttattaaaataaggttttggttaattatgaatatcagctcatttggattaagcaatatgttgttatgagaaaaacttcataacttttagatatgcataaatcgaaatgtccattgtattttgatgatttatttggcttatccaaaaagggaaataaaaaagttaatttactactttccgttcctttcgaagtaagaaaaattgaacgcatacaaatccttcattcaaatcattcacttttacaccaaaatattaggctctcggtattattatatagatgaatcttttttgcattagaaaaagtttaattacgatcagaaagaacattttacaaacatgattaatcttccgagatttatcacaaccaaacaacatgcatgcatgtttatttaaaggacaaaaatattattaaaggctttcactaaaattagcagcttaattaaaaaattaatcctagcctccacatttaatagtgtttctaaaaatgtttaacgatcatgtgtagtcatgatttaatgatgaggttgacctgcaacttcagtccctttgaaccaaaagctcagaccttgtaagttgtaacgagaatgcatatatagcagtacactgcagttattactatcttcttgttgtatcaaaacttgtcttttctgcttccactttcggctactcagtgccctttctcatctctgttcatgttgaagtgacagagagtgatgatttcagttgtattgtatacccttagttagggtttggttctctctagctaaaagctcatataccttttgcacggttttgcatgaaaacggtgaaacactggagtttatataggatttccaataacattgtttaaaacatatactacacatgagtacggtgtaggtcaacatttaattgttgatcacatatttcaaaagactattactatggagtaatattctagactacgaatttaagtttcatcatgttttaacttttttcaatttaggcttcacaatgtactactggttcataaattttaactagttgatatttttaaagctaataagtgcatgtaactttactatccatatcaattactaatgttgatcatgtacactaaatttgactcacctactgagatgtagaattgtaggagacatgcactgagtttgtatcagtagtcagatccaataagttgcaccaaaagagaaccgagccgacctctgcttctcatggctcttctatttctttcctttaaagtgataattaagacatcagaatctgtgcatgtaaaatagagagaaagagaaaagtcaacacaaaaagtttcggtcaataaattatatataaatcacttccgctccatatctcatttctcattcaaatttctctgaaatccaatttccttgctcatacttctttgccttcttcagtgaaaacaaaacacttttctcttctctcttttgtccagagtctttgtccttttgtctcggtctcttatcgatcaggttatgttctaaacggaagaaaagataataaaaaaaaaaacaaaaaaagcaagtttcaatatgtccagatgattgtacctttatcctctacaaaagttcctttgcatcaattgacttcaaaatataagagttcgatggacaaaatttagtttatagtttatcttatttattgattctgttgaaagatatcatgaacttaattaaatatcctagtatatagtttactaataaaaaatattatttgtggttataagatatatacggtttttatccaacttataataaaatgcaagaatatgggtttctaacctagaagatatatgttggacaaagaattttataaatttaaacccctacatgcaatccaactcttccaagtgtaaatattttttaatacaaaagttgtttagtcataattaattctcatatacaaatattacagtcaaataaaataacaaacaatgcagtctcttctcgattgttaagtagcttgtacggattaaacgaaattgtatccaaagggaacaaatcagattagaaaagaaaaagagaaaaacactaaataattaagtggaacgtgacggttccacttatattaattagaaatcgtattcaaaacgcagctgctaatgcttgttgttttccgctccaacacgaaatctttccgctgttgatcgatatcatgagaatgagactgttaccgcgagagcacacacaacgacaccattgtttcaaccatgtatatgaccaatgatcactaagttttgctgtttgagttagggtttaattaaaacctattataaaatagagtttgaagcgtataattagtgttgatccttagaattagagttactatatattttgttgcaacgtgactttttttttgttttaaataacttattctaagttaatattactgcatgatgattaaattctgctactgtaacgtatttttgaacaaatacagtatgaattatcagaataaaggcccctattgtgaatagataatataatataaattagcaccatatggtgaacataatcatgctattcagcctcatctttgactggctcgtgtgacttattagaacttttaagacctacgcatctttctttgagactaaagtatgatttttaagatggacaaattaacacacgcaaactgcaaacatacatatatacaataaaagattaaaggtggggatcgaaataaaaaaaatctgggcgattttatggttcacagaagtttgatctatttaaatatttaattagctaaatgggttataagagaattattttcaaactagaaagatgcgacttaatgcatattttcgtctagctagagtaattggcatgcatctctttttcataatgatctatttcttatttatattgcttggtttaattaccatgtagtaattaataagttgctaacaagttcttcctctataaaaatgagagaacttcttgtactctttcgataatatttctttttcctttttctttatatatgtattaaattaaattgtctatttcatattttgaaatgttaattttagcatgtaatttttcaagtgtctgagttcaattaaaccaattatgtgataagtgaatcagatcttagtcaagtttaagaagaaattaaacttcccttaatagagtttaatataattaattgaatgaacgaataggcctaaaaagatctgaaatccttccaaccccctagcgactaatgaagtgaaagtatgaataacaatgtgaatactgaataatatatgtattatgcaaataaacttctctgattgttcattcttttttattttattttttggcctttgtgattacagcataagatcaacaatagagaggtacaaaaaggcatgttctgatcactcaagcgcgagcactaccacagaaatcaatgctcaggtaatcacatgcatttttatttttactgaacagaaaaactaatagttgtctatatatttcctgaccaaagagaaaaaattctgaaacaagtgattggaaaattaacttatgaaatagtttgaattggttcggttttatgtttcttagattatgcacaattacgttaatctattgtctaattatcatacttgttctctttttgtatcattgtaaaactatgaaaaacagtattatcaacaagaatctgcaaagctgcgacagcaaatacagatgctgcaaaattctaacaggtgattttttattattatcatgattgtttctcttaaaccttctaagcaaaacaatgtacagatattatgaactttatattgcagacaaaacaataatagatataatatgcttgttttgctttttaattatactaattaaaaattagaagcctcatgcaactatataataatgatttatttccctctaatatacaccttttgtaggcacctgatgggtgatgccttaagcacactgactgtgaaggaacttaagcagttggagaatagacttgaaagaggaatcactagaatcagatctaagaaagtaagatgtgtgcatgaaatgttgcaatattgcatgtaattgattgatatgatgaactaatttacacgttacataatttggcatttctaaagctaaagctagttctaccttttaattgagattttcccattagaaattgttttggttctttttaaatctgtattgtctaacgagttttataacaaacgtataaagaaaaataaactacacacacataaaaactcacattttctcacaattttcctttcttgcatcaaaatgattatgtattgaatgataatatgatttaatcttttagctgtccatttgctaatatttttcttgttccttttttgtctttttctctctaactataacagcatgagatgctactggctgaaattgaatacttccagaaaagggtaattcatgaactaattagttcttcaacttctaattaccattacttttctttctttctttttttatggagggaacgggaaggagtacttttatatccctccggcggctaaaatttgttgttatatattatcgttgattaatctgattggcaactgataacatgcattggttaggagattgaactggaaaatgaaaatctttgcctccgaactaaggtaagtagattgaatttctttttcttttcccttcaatattacctaggctaagagaaaatattcatcctaaataaggtaaaaccatttatctggccattaattactttttggtaattcgtttaaaatataatatattttagattttaatatttggaacaatgctttattttttcgaaagtacgaatcaacatttttaatgctttgtttaatgtgaggatatccaaagtgagagaaataaattgtcatttacacacagttatatataatatgaaaatatatataacactgcacaaaatttttggtaaatcaaaatttcttcgatagaaattgtaataggaagaatattattaatggttttgaagagaaggatatgatagataatataatgtaactgaagaaagaaataaagagaaaaaataaaaaatacatgatttttgatttttacatgagtttatatatactttagatattgataataatattacttcctgacgaaattgttatgactatatacagtaatgatgaatgatctcacttccaattttatagataactgacgtggagaggattcagcaagtaaacatggtttctgggccagaactgaatgccattcaggcattagcttcccgtaacttcttcaatccaaatatgttggaaggtggaactgtttaccctcactcagataagaagattcttcatcttgggtaagtgcctagcttctacttttattagctttttcatttccgatcattatcattttgcttttactaaaaataaattttcaaaagacatatacatatgcatgtttaatattaaatagaaaatgttagcaaccctctgcacccttccccgacaaagttgaagaatttgaattcacctaattaaatttaatttactatgagtgtatttagtaaggtcatttataattattttcttatgtcgttataattataaggtttaattgattttttatcatcattaaaaaaaattggtaatatataaaatatccttttatatcattttaatgattaattttattagatatttataattgaataagttaaattagcacctcttaactaaaaagtagtatttttcaacttttaattttgcagcttataattgactaacttatcaattaataattgtatatattcaaattacagcaatataactaataaaatcactaagattagtcgcgtgcttatcactaactcaacttactactgaaattatctatctgtattgccccttagaagatcttgtaacagcacagatctcaaattttccaggtctacgtaattaaagaccaaaacaggatacgaaattcctccattacatagaattcgtgcaaattatttttttaagaaaccatcgctggaattatatagaattcctccattatctattcaaatcatagaatacccaaaaaatacatatcgctgcaattagcgattgaaacctgtgattttaattgttcccaaaatcttgaaatcactggactttaaatccactacatgggtattcggtaattgaattgaaggatggagttaaaagatttttcaattaaaaaaaaaaaggaacctgaatttgtgtgaatgcaacactgcaattttaattcacccaaaaagtatgaatctagaaggtagtgatcttcttaggggcaatatagaagatttcaatcataagttatgggttaaagataggcacatgattggttttagtaattttattagaagcttcggatgataatagaatcaactatcacgatttggtataacttttcctaaaattatgtaatttgatttcatatatatatatatatatatatgagaatgttaatgcacacgtattatttcttttagtattagtgtattaataattaacactataaatattttaaaaaatcattaaatttttttgtatcattaagtttaaagtaagaatattataataatttattatttaattttaaaataattaattttctatcctatttcatctttatcagtattaaagtttcagacactcatgtttttctcttgtaaacattaaattatcaattattttttctctcttaaacattaattagattatatatttatataaaaacaataagtatatatatatatattttttattttgaaactttgaattttgtcgtaatttattacctcattgtaatatacaatttttatttgaataataatattttacttctgacttatttttctcctcatcctgtttcgtgactttttttatgatgcaggtgatcaataatatatgatcttggctagcctatggcatgtctatccaattagccggtggctaaatgcattattattactactcttttggttgctcattaactagaccatgtgatctatatactacttatggattatggatacttatgtatgatgattgtatgatatcataacaatcagttagaaataataattaaaaaatagagttgtgtttgaagacactaagttatcattatattaaggcattatatgaaccacttgaacatacatttatctaagtaatttttaggaagtaatttacatttacatgacataaagaattagtatggtacaactattattgacaatgtataaaagcaatcttattcttgcatcaagtgcaaaaaaatacaataatctttttttttaatttttctcttcttccaataaagtgtcatataaaaccttcaatatatagtaaattagataactgaatataacactttttagtgttaagagacgtcaaatgatttctaaacaattttattccatatcttgtaacaaaaaattaagagaaaatttataattagtaattagtatttttatattagattttaaaatttattttaatttggactgcacgttgaacccattttgcccagataatgtgggtctaaattcaacatgttgacctaaatacaaagcaatgcagtctaatatatatatatatatatacacacacatatggcccagttgtaatatagtcaaagacaattcttaacaagcactcaaaaatctccagagcgtgcatgagtgaatgctttccttatgcagcatttacgcaagagaaatcacatttacatggaaaatattatataaggagtgttaggtatacatttgaagaacatgacctcttgccaatgagacatgaaaattttggtgaagacaaagtcaaagcattagaaatttgtgtaaggctctaaatcttagctatggttagctcataagactaatattgaaagataagaataaaaaattaagctttccaaaacctagggtcgtcgtagagctttggcaatccatatacagtgcaagaaagaatataatagagtgatgatgatgaagatagcagaattatttttttttaattatagaattcattaacattttaattacttaacctgactattctaatccaaaccaactccatgatgatcaagttacggacttgtttgggtttcatatatttaaaatcaatatgccatggtatatgtgtattgaaatttta

SEQ ID NO: 336 - DNA, 4035 bp, Glycine max; identical to SEQ ID NO: 281
  source 1..4035: mol_type = genomic DNA

SEQ ID NO: 337 - DNA, 27003 bp, Glycine max
  source 1..27003: mol_type = genomic DNA
ggagagaaactaccaggaatataactcgaaacttaaactcaacattaaacatgtaaaaccacatataatcagtagaacaaaattaaattacatatttaattataaatttaatgcatttatgctttttttaaaaatgtatttatttcaattaaaggttccatcaccaaaaatttgtaaatatatatatatatatatatatatatatatatatatatatattatgtttaaatatgttttgttgcttgtaagtttgttttttaattttgatcctcatacattttttttgtttatttctaattcctataagttaacacttggtcaattcttgaacttatacgttttttatttgtttttaatacatttaagtttgtatttttttttaattctggtttctataaggacaaatttacctggatataaaatatttttttaaagagattaaagttaaaaaaatacaaacttaaagaatttaaaatgaacaaacaaaaattataggatcaaaattgaaaaaatataaaatattttgtcttgtctctttgcatgtgtttcaatgagtgagaaatgaagaatgtgtaaaattaaatatatgtataattagaaattataattaggtttaatttcactttttatttctaaagttgctttttgatgaattttatttttgataaattaactttgacatattttatcatcaattttttaaaaatttgtaaaatttatttttcatgatggaattaatgtaacaacgtaaaagttgaaagtaaaatttataaaaaataaaaacaattaaaatttaaaaatataattattttagtatgtcaacgtgagtttaacaataaaatataaaacttgcatgttttttaaaaaagttgacagtaaaatatattaaaaataaaaaattagagataaaaaagtagagttaaagcatatgggtaatgataatggatgcatgcacatgtacatatgtgtgtagagtaacatggcgtgacagaggataggaggcgagaggaaaatatcattgccacgtatgcaatcaatctaggcttctcagagctgctaaagatcttcctccttctttctctctcccttgtttgtgcagtcttctggctctcactctctatttatcacaccattaaccaccacctcttaaatatattttccataaatcaccaaaatttcccatttttttcacctccatcgtttcacccactgaatcacagttttcttttcttttctttctaacaaaaatcgcttctgcacacacaaggattcaggtacattttttctttctttctatttttcttaattaataaataaaataatatatattttccaggttttgttgttgctgtgttaatttctgaagtggatttgattgtctcttttttttatatatatttttatggtgaatctgagttgttagatatttgaggggcttattattattattttttttacttattgtaattatattttttttggtaatttgtattagcttttgaatcttagattacctctttggccttgagagaaattcaatcctacaaatccccattctcactattattactattttactcctttttcttttctttttttaaatttgattttgctctgtttggcaggattctgtttcagatttatccgtgctctgattttcattatttagaaaacaatttgattattttgtagcgtgttttagactgaaaagaaactttgaaatcaccaataaatttgaaaaaaatacatatattcaagctgcatagggcaactagttgttgtggtaaatatttacaattttctcgagatgcatttggttgtcttcttttgtgcttgctttctgtaaaaagaaagcttcttctgaaatatgatttggtggatgattaattgttggtgatgtattggttactaaggtaaaaaaatatctggccatggtgaacagggaatggtgaattacgatattttaattattgattggtagcatgttttggctagaatttggataattgcttttgattatcagaggcagaaggaaacaataccttgaaagtagatagatgtcgtcggcttcttctttgatggctgcttccagtgaaaggtggattgaccgtcttcagtactcctcattgttctggcctcctccaccggatggtcaacagagaaaggtgccatttcaatcttgattcctccccccatcccttttctgtaatgttcttctctcaaaataaactttaacttcagtgcatttaatgtcagttgcactattatttggataataatgataatattgttttgtttaaagtttcaatgtttggaatgaagcttttagaatttcagcaattaagaaatggaaattctctatgaatacataaatagaatatatatgtgatctattcatcctatgcacttgatgtatatgttaaaggggagaaaaatggaaaatttttattgaaaaagaaaaaaatatttattatactagaaacacataaattatttagtgcttgctttttttaagtaattgaaagcatttaggagacattggctatgacaatgaagataaatgaaagaggcagcagattaacagggatatagattaacaaggttttagagggtctgagtcttgcgcttttggtgcattttgactctgcataagtctgcattttcttctttggtcatgaaatgtttgcttaactcatggtgatttttttcaagtattccatagccacaaattcatatagcaacaaaatgattagcaactttttacctctccaaaagattagttaagggttttttaacagattgaaaatgaaattgttaaggagggggactgcaattctcgatattttcacctagtgattaactcccatcgaaggtctaatgctctaaatggtgttaatattaatggatcctgggttgataatccatctagagtaaaagaggaagtttgcagctttttccagcagagatttcaagaaactatgagcagcagaccagttttgaatggcacctcttttcacaccatcggggatcaggataaccagatgttggtgggcagatttagtgaggaagaagtcaggaaagcagtttgggattgcaatggtgataagagcccggggcccgatggtctcaattttaaatttatcaagctcttttggatgactataaaatctgatgttctccgctttatggacgaattccatgctaatggtatcatcccaaggggagctaatgcttctttcattggcttaattcagaaagtgcctgaccctcaatgcctaaatgattatagacctatattgctcataggctgtatttataaaatcgtggctaagttactagccaatagattgaaaagggtaatgccaattattatagacgatcgccaatctgcttttatatccggaaggcacttcctacacagcgtagtcatcgctaatgaagttgttgaggaagctaagaggggcagaaaatcttgtttatttttcaaggtggatttcgaaagagcttatgactccgtgtcctggaatttcctttcttacatgcttcgcaggatgggcttttgtagtaaatgggttatgtggattgagggctgtctcaaatcagcctcagtgtcggtgctggttaatggtagccccacacctcaatttgccccccaaaaaggccttagacagggtgacccattagcccccttgttgttcaatattgtagctgaggggctaactggtcttatgagggaagctattaagaagcagctgtatgatgagttcttagtgggagagaaatcagtccttgttagtattcttcaatacgttgacgatactatcttctttggggaggctactatgaaaaatgtcaagactatcaaatcaattttgagggctattgaattgtcatcaggacttaaaataaattatgggaagagcagctttggggtgttgggccgttctgaacattggaaactgcaggctgctagttatctgaattgtagaatcatgcctctgcctttctcttatttgggaataccaatcagggctaatccaaggcgttgtgggttatgggatccaatcctaaggaagaccgaatcaaaattgtctaggtggaagcagagacatctatcttatgggggaagagtgaccctcataaaagcaactctaacctctattcctattttctatctctcttttttcagaatccctaatagggtagcggaaaaactgacccaaatccagaggaggttcctatggggtggtggccttgatcagaagaaaattgcatgggttaaatgggatactatctgccttccaaaggataagggtggcctggggataaaggatatcagaacttttaatagagctctgctgggtaaatgaagatggaacctgatgcagcagtataatgatctttgggttaagattctcatttcgaaatatggaggttggagggctctagaggaaggaacatcagtcaccaatgaatccatatggtggcaggatttaaggtcagtcatccatgaacaagctgtgcatggtctgtttcaatctgcaatagattggaaagtggggtgtggggataaaatcaggttttgggaggactgctggctcatggaacaggaacctttaagggcgaaataccccagattgtataatatatcctgtcaacagcagaagcttatccaggatatgggattccactcagcaaatgtttgggaatggaagcttgaatggagaagacacctttttgacaatgaggtgcaagcggcagccagtttcttggatgatatctcgtggggtcatattgatcgttggacattagactgttgggtttggaaaccagaacctaatggccagttttctacaaggagcgcataccgtatgctactagaaggagcagctgatcagactggatgaggctttagaggacctatggcagctcaaaatccctttaaaagcaacaacatttgcttggcgattgatcaaagagagaatcccaactaaagggaatttgtggagaagacgggttcagctgaacaatttgatgtgccccttctgcaatagacaggaggaggaagcctcccacctgttttttaattgtccaagaattctccccttatggtgggaatccctagcttggaccaaaactgtgggagtattctcccccattcctaggcagaattacatgcagcacacgcttatctccaaaggaaagcatctgcaggctaggtggaagtgttggtgggtggcgttgacctggtcaatctggcggcatcgaaaccggattgtgttcctaaacaaggcttttaatggatccaagctaatggatgatgctattttcctagtttggtcttggtttagacagctggagaaaggctttgcacagccctacaattattggtctagcaatttatcaacagcatttttttaatagggtagcagtgcagggttattgtattccctttagattggcacctgattcgtaggacctatggttctgctagtctgctgctttctaccttgtatatttagtacctctggtactcacagttattaatacaaattataattttgctgatcaaaaaaaaaaaaaaggatgtagtacaaaaccttcatgtgactttactgcacaacttaagctttcggaacagttagttcatgacatgatattggagtctctaagaacaaccagtctatagtttgatccttgctgctctcattatcctaatgaaaaagatgagtttcagcacaatataggtgggtccatgcattatccaagctttaaacgcaaagggcacttgtgcgaggggaatgtattggagatacaatataaaaccatacatgtgcctttaactaaggacttaagttgtcgagatagttgattcatgaatggaatgatatggagggatgcatctttgtactttagtcttggcatgaatcagcatacatatgggcccacaatgaaagtagcggcaatttgtatttgacacagtctaactgttagatatttgtgattctctggtattttctgtgactgatggatatcctgaaaatttggaaaactttcatgtatgtcatttcaaatatatatatatatttttttgggggggtggggggtggggggggggaataatgattaacagagaaaagattctacagtggaatccaaagtgcttatggtcggactaagtgccagaatttttaaggataattttctttccagttgcattattttgtggaattaaatgatctttttgctatctcagccaatctctatttttgaggggtctctttgctgataggctggagagctttgttcacttgatgtgcaattcttttttttttaatctctcttttgaggataccatatcttctattgatgaaacattctctgaaatgggattatataatcaattgttttgtaatcctttcttaatgtagtttcacacaagtttcctccataaccatattaagtgggtagtctttcaatattatctcttaaagtttgtattttatcttacatgtaagaaattggaaactgttcaatcttattgtactagcgtgaaagcaacagtcttttggtgaattgttttttttaaagcaggcttttggtgaattgtaacactgtaaataactgtttctcaatctatatgtaaacattttcatgtcttctgttatattcgaagctcattattgttccattttgctgttttttctcattatttatgctttccctaggatcaaattgctgcatatgttgagtacttcattcagtttacatcagaacagtttgctgatgatattgctgaggtatgataagtgcacccatatttactgataaatcttgtgaacttgaatagaaatatatacaaattatttcacaagttcaatgtttttgtattattttttgcatgagaaggcccagagtttttatcaaatgccactcactgttctatattattttgacagttgatccgtaaccgttatccatccaaggatattcttctctttgatgatgttttgggtatttatgctctatcccatgtcagtttaacttatggttgatttaacaaatattgttagcatgatttattatttgtaataacttctttatgttttcacatgtaaatctagcaacatttgtccttcatcatccagagcatgggcatgcagttgtgcttccaattatttcatgtattattgatggtactctagtctatgataaggctagtcctccatttgcttctttcatatcttcagtctgcccaaaaattgaggtataagtataatcccctgctcgatattttgattttatttatatataactcaatttcatagctaaaattctcttgctttgtgtctttcagtttctaaactgatttaatatagcaattattcaatttcagtatctacaaggaggtcctctattattttcatttcttctgtgtataattttgcagaatgaatactcagaacaatgggctctagcatgtggtgaaattttgcgcattttaactcattacaatcgccctatttacaaaacggaaagacaatctggtgaaacagaaagaagcactagtggcagtcatgccacaactagtgaacctgggaaatctgggcataattctttgacacagcaagagaagaaacctattaggccgttgtccccctggattactgatatattgttgtcttcaccagttggtattagaagtgactatttccgatggtgagtgtttcttaacaagtaatagataatttagctctatttatttggccagatgtagttaatcatgtatgcatgtatgttttaactttgcttgcaagtcctaagggtgtcgatggtttgattcactttcaaagcatggtttattattgtttcaagtttggtcagtaccacttgaaataaaaaagaaggaagaactgaatatatttttgtgtgtttctaatacaagccctaatcctcttttatagtctaaatggctaatcctattaaaggaaatagggaaattaacataaaaaggaaagtgaggcaaatatcaaagatatgagatatttacctatcgagataatatcaaagatatttactacacttcctctcaagttggtaagtgaatatcaagtattcccaacttactagtaagttcatggaatctcgctgtagggagtctcttcgtgaatacatttgccaattaaagccacaaagggatgtaggctgtggctatatgatcgttgtccaacttttccttgataaagtgcttgtcaatctctatatgcttggttttctcatgttgtacgggattgtgggcaatgctaatagccggattatcacaaaacaaccttatagggtcttcatactttatcttgaggtcatcaagaatgaccttcatccataacacttcatagatattgtttggcatagttcaaaactctgcttttgcactagattgagttattgagtgttatttttttactcctccatctcaccaggtttcctcccataaacatgtaccctgaggtggatcttctatcaacaatttaccggacttagtgtgcatgtatatacacttccacggataatgtacattctcttctgaataacaatccttttcctgtacttgccttcaaatattgggggattttatttaatgccgacaacaagtgcatattttggggatcatgcatgaattgacttcctacacttacaacataagcaatgtttggtctagtgtggtataaatagatgagatttcccaccgatcttggtattgagacttctctactgttgggcttttctcctcacttccaatcttgtggttctgttcaattggaactctagatgttttacaccctaatttgtctgttcttttgagaatatcaagtacatactttcttgggagataaaaataccttttctggaataggcaacctctatcccaagaaagtacatggaaaactccttcatttcaaactgggttgccaatttttccctcagaacatgcttttcagtctcactattagatgcaatgaccatgtcatccacatagaataggagtgtgagtttgccatcataagaataatgctttatgaaaagggtacgatcacgttgacattgtctgtactttagggatatcatatctgttaggaaccaagaattgaaactttggtgaatcttccaaatcatgcttgaggcaattgtttgtggccatacagtggtttttaagcctgcacactttattcttttcattatgagaatcaaatcctagaggaatttccatatacagctccttttctaggtctcatgaagtaaaatatttttatcatcgcgttgttgtaggtcccagccaaaatgagcaactagaaaaaggataattctcactgtattcgaatttgcaattaaggccaatgtctcttcctaatcgatcccatatgtctgtgccctttgcaactaatctcaccttataccaatgtagggtgccatcaaatttatatttcagtgtatattcacctgtaaccgactgccttctaatcttttgacctatctacaatctagcaggtcaagtttttttttcttcttcttctaatgtcttcatttcttcattcatgcccaaacccagttctcatcttattgatttaaggtgggaattttggttttgttaaagatatgatgtgattagatttaatgtaaatagggaaattgtgaatgcttgtatagcagatttatagggatttaatttcgtatgtttccttaattattgttatcacttgattataaataaattagcttgagtgagattagacacacaattcctgtacaatctcttgtggtatcaatgattagggtttgatcccctcccacatctgtgtgcgaccttctttgcagtttgatcccctcccacatctgtacaacctctcatggtattagtgattagggtttgacagccactgtgccacacttccgtcagtgtgccccttcggccatcgtcgtcactctctggcaacccccacatcaccatacaactatgcacgctcccgcacacgctttcgcctaataggcgtgttacaccctcttccaacgacccgctccagtgctgttagacttttgttttcatagcttctgatggttctgtttccaatttagcctttgtcgtgacttttaccactattccgctgatctcatgcgagaaactaactgggacaacaaactacagtacttgggtagccctatccaactatggttccatatttggtagactcaattgttttactttcaccaggctagacatcacctttgcaataagtgtggtaggtcaattccttaatgccccttgtaatagccattgggatgttgtcatgtgcattttcagatatatgaagacaaaggcaatgacaagattgtttgttactctgatgttgattggacaggatcatcatcaaataggaggtctacctctggttactttgttcttcgagatctcatggagaagcaagaagcaaaatacaattgctaaatctagtgtcgaagctgaatatcgtgccatggcagcagctgcatgcaaaatcacatgacttaagcaacttctccatcagttacaatttgaagacactcgagacaacaagcttatatgcgatagtcaagccactcttcacagtgcaatataatccggttttccatgagcaaacaaacacaaaaaaatagatagtcattttgtgagagaataggtactctcaaaagaaatcaccactgactttgttagctccagtgaccaactatgttcactatgtctctcaagggatcttgcatggattgcatttgttacaagcttggtgcatatggcatatatgctccaacttgagggggtgttaaagatatgatgtgattaaatttaatgtaaataggaaaactgtgaatatttgtatagcaaatttatagggactttgtttcatatgtttccttaattattgttatcacttgattataaataaatcagcttgtgtgtgagattagacacaattcttgtacgatctctatagatttcatcaatggttgcaacaagactctggtgctatgtagaaagagattagtacagacaaattgggatattatcttatataagatacctggaacatgatctttttcctttcattaaggcaattggcaaggcatcaattacattttcaagcaaaaccacaataacactttcaggattaggaattttgtagaggaaaatcgacattaatactttcaaaattaggaatacttatctctagattggacgattgagtttactgcgggaccaaaatgggttcttttgcctttggtacttgttcttgtagaattggcctacctctcctgcttcgtccatgacttcctggtttggtcataggtggttctggattcaacatgacctttctcctagcttcctttcttcaaacttttgagaatacttctcaaatatagggtagtggttttcatgcatgctagaactcttcctcttacttcatccaagtcgcaatcaagaccaaaaaggaacatgtgcacactgtcattttctttcttttttggcttaaatatgtttttagtccttcaaatttagggtaaatttgtttttggttctccaaatttaaagttgatctttagtccctgtaatttgagaaaaacttgttttagtccgactatcctaagactgttaaagatatcgctgatgtggctaacgaattacaagttgtttatatgacaacctactttgattttgcattattataatcaaacaccctacatatttgtttttctttcaaagtattaattctaatgacatttaggccaggggtgtttggccagagggaccataacaagctttttccaaaattacagggactttcgaccaattttaaatttggaggaccaaaaacaaacttccccatctcattgatgaaagacaaacagccttcattaaagggagacacattctgcatggagtgatgatagctaatgaggtcattgctgaagctaaaacaaagaataaaccctgcatgttctttaaggtcgattttgaaaaagcttatgactcggtgtcttggggcttccttaattatatgatgatgaggatgggtttctgtgacaagtggagaaagtggatccaaggctgtctctctagtgcatctgtttccattttaatcaatggcagtcccactagggagtttatccccgagagaggactaaggcagggggatccccttgccccttttctcttcaatttggtagcagaaggcctcacaggtcttatgaggacagctacatctaagaatttattcactagctatcaggtgggaagcatgaaggaggatgtaaatattctgcagtatgcagatgacactgttttttggagcagcaacttcggccaatgttagagtcttaaagtctgttctgagatgctatgagctggcttcaggtctcaagatcaactacaccaaaagccagtttggttgcttgggtaaatcagaggcttggtgtagagatgcagctaatttccttaactgcagtcagatggacactcctttctcctacttgggaattcctgtggggtcaagtcctacaagcaggagtgtttggcaaccaatcatcaacaagtttgaatccaaattggcctcttggaagcacaggtgcctatcgatggggggcaggataactctaatcaattcggttttgacagcattgcctatctacctgctatctttttacagaatctccaaaaaagtagtccacaagattgtttctattcagaggaactttctttggggaggtgataatgtttcttccaagataccttgggtcatatgggacaatgtttgcctccctaagagcagaggggggttaggtattaaagatttgaataagtttaatgctgccttgcttggtaaatggggctggaacttggcgaataatcagcatgagctttgggctagaatcttgttgtccaaatatggagggtggcaatccttactctatggtagaaacagtgctcacatctctccttggtggagggacttaaaatctgtattccagcagcagcaacataatattctaaccactaacttgaggtggaaggtgggtaatggggctaaggttcagttctggttggacaagtggaggggggatgaccttaccctcaaagacaagtatccagctttgtttcaaattagtctccaacaagactctactatcaatcttatgggccaagctgctgacaacaggtgggattggagattccaatggaggagaaatctctttgaccatgagatagatatgatggcagctttcatagaggatattgctgttgttcagatccatccatcttctatggacagtcttatttggagggctgataatactgggtcttattccacaaagtcagcttataatctcttgatggttgattctacctctttagctgaagacactgttttcaggagtatgtggaatatgaaaattcctccaagagcaagtgcattctcttggagactctttaaaaacagattgcctactaaggtcaacctaagaaggaggcaggtggctctatcatcttatagatgccctctatgcgatgaagaggaggaaacagtagatcatatcttgttttcctgcacatcaaccaggagcctttggtgggaggttttgagttgggttagtagagtgggccctttccccattgaccctaaaagtcattttatacaattctcgcattggaacagcaatagacatctagacaagagatgggaagtgctttggatagctctatccatgactatttggaagcatagaaattcagtggttttcaaaaatcacattttcagccccgaaaaagtcatggacgaagctttattccacacttggtcttggctaaaatgcatggacaaagacttccacatacatttcaaccaatggtctactaacttgaaggaagagctgtcttagggggctttctctttttgttatggcttctgtgttttttgtacattttatgtcggatgggttaggcaaatttgccttgtacattttatccttcatccagtacacctagtactgatttatatataatactatatatttttgctgtgcaaaaaaaaaaaaaaaaacaaacttccccagatttgagggactgaaaacatatttaagacattttttcttgaaccaagttgcatccttagggtttttctaatcttcttgatagcattagtccaactcttgccagagggttaccattatatatatcgtaataatggtaacatcttaatcaccttgtttctattgtccactaccccaattgacttcttcctttcatagttaacttcacggattatgcccattgcttgaaaattaagaagtgtagaaagattgaattgtttcttttgattaaaatgtagaatgttgatacatatatatagatcctgtcctaatgaggatatcccaattaaggaaataaagtaagaaattaaaatttaaattgtatacaatcagcctcctaattacaacaattacaatcacaatcctgcttaattacagatcatatctaatcttctcttatataatcatgcaaagattccatctcaagttggtgaagggataatatcattcttagcttacaagtaagattgcaaaatcattgtgtagagtctcttggtaaacacatgccaattaaagccctaaagggatgtgcccgatagttatcacaatatagccgcataggtttctcatactccatcttgaggttatcgagtatgatctacatccacaacacttaacaaattttttgagccattgctcaaaactctacctttgcactcaaccttgccatcccatttagctttttactccttcaagcaatcaagtttcctcccaagaacacgcaatatcttgaggcagatcttctatctacaatcaacctctacatagtctgcatatacttccatggataacttttctctcatattgaagagaagttctcttcctagacttgccttcaagtactaaataatctaatttactacttgtagatgtctttcgcatagaccatgcatgaataattgcctaatcatagttatcgcaaaaacattatctggtgtagtgtgggctagataaataagttttccctatcaatctctgatatcaggcctatttgagctctcccattcctatccaatgatttttcttgatgagctctccatatgttttacgacccaatttgcttgtctctctaagaagatcaatgacctattttctttgagagataatgatgccttttttggatttggcaacttctattttgatatttttttttagcattcataggtccttcatttcaatttgagttgttaacctttcccttaggatttgtttttcaacttcatcatttcctgcaacaatcttatcatttacatagaccaaaagcattgctaatttacttgtctgaaaatgctttatagtgtggtcaccttgactctgcttataccccaaagagagcatagcttcagtaaacatcccaaaccaagcttgcagagactatttaaagccatattgccttctcaacctacacaccttaatacctccataatccattagtgaagtcataccttggtggaatctccatatacacctcctataggtctccatgcagaaatgcattttttacttcaaattgttgtagctctcatccaagtgagctacctatgagagaataatccttcttgacgatattcatctttgctaccagagcaatgccttctcatagtttgctttgtacatccatctgcatcattgtcccatagtcactcagtttatcaacaatctcccaagttttatttctttccattgctgttggaaaccttaattgcagaaaccccttggcccgccttagttgtggcctctttgggggttttctaaactgcaaccttgagggtggtggtttagtggtttagtcctacatcaactagagatatggccaaattaatgtatataagtgggggacaatcctcacccacaagtcggttttgtagggttgagttagacctaacccacttttcaagatggtatcagagcctatcctagatccattgttgggtcacttgcatttggcacgtataggctggaagtcttgggcatgaagggggagtgctagaaaagcctccttaattgcggacaccccttagcttgcctagttgcggcctctttgggggtagcctgaagtgcaatcttgagggtggtggtttaatggtttagttccacatctactagagatatggtcaaattaaagtatacaagtgagagacattcctcaccttacaagccaattttgtaaggttgtgttaggcccataactcactttctaagaattgtcttcatctcttcattcacagttcagacccaattttcaccctcaaggcatcttggatggttttgggaatcctgatgaaattaatagctgaaacagaactctaaaattgtgtagaaagatgtttaatacataacaaattgagatataggatactaagcttggcgaacactgtaatgccaacgtcaccacccacactgcttgtttgtagttgagggacatggtggaaggttctgacaccaattgatgagaaccttgggagaatcacaccacaagctagctgttgtagttggagagcccgaggctttataaacctttcactagaaatcccatgctttcaatgtaggactccaagtctcataccttgcaattggatcctaacaatgtccttatatatcactacacacacgcacacaatgcaaccatgactcaccaattgaattggttacccaataacttactacccctgccaaatcgataactggttcagtttttattacactgctttactttgtataattcagttggaatgtgtagtttaaatacatggatttcattatatatctctcgtttctctcatctctcaacaattacataccactcttaagtcttaaaagatcaagtaggtgccaattgaactacaagcttgtttggcagcttttcctgattgtttaatgaaatatatggattgaactaaataattatctttcaaaacagtgttaaggaaagcatctgaattcatgctcattaggggttacctttgttggtgtatagcataactaagttcagggatacataattccatatttttctctcaatagtgtaaattagaacaactagtatggttatagactctcttcctttatcttgattaaagaaacagcttacttgaattgactctcccatttatcatagtataatgttttaaattatctttttatcctttgagcattgagtatatttttgcttaagtcaatgatttttctgcatgttaacaggtgcagtggtgttatgggtaaatatgctgcaggagaactgaagcctccatcaaccggtacaataattttgataacttaataccggatgctgttctttattttttaaaatgatgttcatccacaatattttgtgaacaattatgtcaaaatatttgagacatttcttcagaaagtggagagtttgtttaagttgtatgtttattttcagtttttgtagcacttaaaatcttgttcaaataccttttaatcaaaggtttttgttcacatgagcttgagttatgtttacactatatgttacttaactatgtacacagaattttgaattccttatgccttcaatctttatgttcatcttcacccctcttatttttaatgcctctcctccgtcactaagtcaaaccaccattttatctgttaatccaaatatgatatgaagaatgcattgaccaattaagtttagttagttaatcttattaaatttctcaaaactgaattaaataattaatcgtattctatccttgaatgaggcaatcattctttttcattttcagacttaaagatgaattttaggttgcattcttatcaattattatgtactttggtttgtgactttctgaattaagcagaagttggtaatcttggcatgcaactcatgtttttgaaagaaacatacttttttgagccatccaaaaatgaggaggaagggagagaaagttctatgcggcaaagagatagaataaggcacttgacagttaagataggaaaatctactaattgctacacagaaatttgttgtagtagcatcattggaaacctcttttggtacttccatttgaaaaagaaaaactcaatctatgtccatagtgttggtgttttttttgcatgcagccattttgtttaaatgttgagatcagagaatggcctacttgaactcaaatacttactgttaaataatttcaaaaatactgaagctattgcatcctgttgcccaatataatagtagaacaccaatgaggaaatttaatataataatagaatacaatgtagaaaccatgaagcttagttcttatatatcaaagttaactttttgttataatttttgtttatgtgattattgtacatttttggagcactaattgattgcacttaattggcattcttaacccaaggcttccatgacgaaacatcctcaatgcactgggaggagactaggaattagttttgtttttttttccattgaaaagctatattcatcaatgaattttatcaaacaaaaatatcattttttactgtcatattgacactgatgtttatgttcgtaattgttaggaagtcccacatcacccgcctcagttttttgggtgcagcttatatatctgttaggcaacttcacttagtgccaattggctttaagttgaaatctgacatgatatcagagtctatagcccatcttagttcttgcctattctagtaggctcgcctgtattggcaggcatatgtggagggggggtgttaggaagtcccacatcgcctgcctcagttcttgaggtgcaacttatatatctgttagacaatttcacttagtgccaattggttttaagttgaaatctaataataatatgataaggaattgacttttttttacctttagcttcttcccgtggttctgggaagcatcctcaacttgtgccttcaactccaagatgggctgttgccaatggtgctggtgttatattgagtgtttgtgatgatgaagttgctcgcaatgagactactactttaacagcagctgctgtccctgcacttttgcttcctcctccaacgacagctttggatgagcatcttgttgctggattaccagctctggaaccatatgctcgtttatttcataggttattttgaacttaatacctttcttgttttttagttgttcatagagttcatctgcctgacaaaatatatatacacctaacatttgcagatattatgcaattgctactccaagtgctacacaaagacttcttcttggacttcttgaagcacccccatcgtgggctccagatgcacttgatgctgctgtgcagcttgtggagcttcttcgagctgctgaagattatgcatctggcataagggcaagtataatcttgatagacagaataactgtgatgctggcattaatggaaacctgcattttcattattatggtttccatatgaaatttaattagacaatcgtcaaatgatatggaactcaggttgtgcattggttcatttacattgttgaatatttggtttttcactagattttctttcacgttctatatttcttaatagttggtgaatctgctagttttcctgaatttttcactttgaattcagaaaatgttagtgaaaatatttttaaaataatgcttggctaaacagatatttataacctcatgaagtataatggagagacttatatttaaaaaaaattatttgtcacttttataacctcttgagaagatttgagggaattctattttgcaacttcagaacaagtgcaacatacaataacaattatgtatgtgtattgcagtgggattactaaactttgtgaaagatttaaaaccaactgactgatgtgtttttcttttctgttatatgtttaatgcagcttcctagaaattggatgcatttgcacttcttgcgtgcaatagggactgcaatgtccatgagagctggtatagccgctgatgctgccgctgctcttctttttcgtatactttcacagcctgcattactttttcctcctcttagacaagttgatggagttgaagttcaacatgaacctctgggtggttatatttcttcctataaaaagcaggttgtgtgcaactttatcagttaacatttttttttcttgattattcttattttttacagtcactcacgtagattctttccatacacttgaaatctaaaacctttgttgttgatcagatagaagttcctgcagctgaagcctcaattgaagctactgcccaaggcattgcatcaatgctttgtgcccatggtccagaggttgaatggagaatttgcactatttgggaagctgcttatggcctgattcctacaagttcctcagctgttgatcttcctgaaattatagttgcaaccccgctacaaccacccatactgtcatggaatttgtacatacccctactgaaggtcctggaatatcttcctcgaggaagcccatcggaggcatgtcttatgaaaatatttgctgctacagtggaagctattcttcagaggacatttccacccgagtccactagagaacaaaacagaaaatcaaaatacctagctggcattggctctgcctcgaaaaaccttgccatggcagaacttcgtactatggttcattcactcttcttagaatcatgtgcatctgtagagcttgcttcacgcctactttttgttgtcttaactgtctgcgtcagtcatgaagctcaattcagtggaagcaagagaccaagaggtgaagataactattcagctgaggatattattgaggacttacaaacatctgaaaaccagaaagtatcaaaaaataggaaattgaagaagcaaggtcctgtagcagcatttgattcttatgttctggctgctgtttgtgctcttgcctgtgagcttcagttgttccctttgatttcatgtgggaataatcgtttagcttccaataatgtgcaagatatagccaagcctgttagactaaatggatcctcccatgagttgcagaatggcttagattcagcaatgcgtcatactcacagaattttagcaattttagaggcattattttcattgaagccatcttctgttggcacgccttggagttacagctcaaatgagatagttgcagcagctatggttgctgcacatgtttctgaactatttagaaggtcaaaaacttgcatgcatgctctgtctgttcttattcgttgcaaatgggacaatgaaattcattccagggcgtcatcattgtataatctcatagatattcacagcaaagctgttgcatctatagtgaacaaggcagaaccattagaagcaaccttaattcatgtaccgatttggaaggattccctcgtttgtgttggtgttaaaaggcagaatcagtgtgaaagtagtagctgctttgcccctgggcagacatctgttgtaccttcagaagattcattcccatcaaaagttgaccataattctcagaaaaccccatgttcaaaggatgcatcagattataccttgggtaaaggtgtcacaggtttctcattagatgcttctgatctagccaacttcctcacaatggacaggcatataggattgaattgcaatgggcaaatttttctaagatccacgctggcagagaaacaagagttatgtttctctgtagtttcactgttatggcacaagttgattgcatctcctgaaacacaaccttgtgcagaaagcacttctgcccaacagggctggagacaggtacaaatacaaatgttatactgcagcatctttatcgtcttctcttttttttttttttgctgaattaatattctttttcttccaatggttgaattatatgtttttaacctaaaatgaaatttaagaaaatttccttgtgatacagcttagttcctgttaatcataaaagttaggttctgaaaagcaagaactgtggatgaggataaataggtgtatcctgtgtacacaagaaacataggaaagacagccaaaattctgaaactgcaacatatgaagaaaattgtgtggtctcaaattttaaaaagcagagaaagctacatcccttaaaatgagcattgaaaattgtttttgaaaataactaaatagctgttctcatcaaaggcagattgttgtaaaatctacagtaaactggaagaagcatcacgccaagacaagatatattgggtgtacttgtaacttatgaatgtaaaatgaaacaaggataggtattaaagaattcatggttgtgttgtttaaatgctacaaattggtaaagattgactaaagaggtattgaaacaaatataataagatatagttactaatgcgtatatgtgtgcaatgtgattgtgtggatccaaatatctcttcgatatccctatttcaagtgaaaaggttctttactgtctatgtggatccaaatacctctttgatatccctatttctagtgaaaaagttctttactgtctattttggatttaatgttatgtaggttgttgatgcattatgcaatgttgtgtcagcctcaccaacaaaagcagctacggcagttgtacttcaggtccaaaattcgtcttatcatgaatggtttcataaattacgtttgccactaacatgaactcctattctgtttagcaagattactttcttttaagaattatcatttttaatacctctgagaattggcttttactgtctaaaaagttcaatagctgatgctgaaaatctcatctatccaatgtttatttgttgtacattttttttataaattattattattacccacatttcatttgtatagtcactttcctgggcttgtttacttgtcaggcggagcgggaattgcagccctggattgccaaggatgatgatttaggtcagaagatgtggagaatcaatcagcggattgtgaaattgatcgtggaacttatgaggaatcatgagacttcagaatcattggtaattgtggcaagttcttcagatttactactgcgagccacagatgggatgctggttgatggagaagcttgcactttaccacagttggaggtagtatgtttcaataagtgtatagttatattgtgtgtgatttctatgttcagtattgtatttaattagtttattaattgttgttcagtaatctctgcatgtgtggttaatcatgtcttctatgagtccactcacatttcacatatttcggaaacctaaaatgaggttctagatgaggtatattgtatagtgatcatgttcattgtgaggtagaaggttcaatgatgtagagtatgctggttctgtagaacagagaggaccttgggattgtaaacttgtcatggaaacctggtttcttggaagagtaagaagcaaaatatagtggcatagtcaattgtagaatcagattatcatgctacggctaagaatacttgcgaacttgtgtgggcatcacttgttggaatcaacttcagaagtactaagcatacacaagctagagtgatagaccagatgctattcatattgtgtttagttctgtttttcatgagccgattgaacacaatgaagaagattgtcactgaggaacttcagcattggctcatttctacaagttatgcaaggaaagaggtctaaaagcctgatactattaaatgttgttagaagaggatagattatatttgtagcaagctgcacgtgattaagaccttaagtctatttaagagggggagtgttaagacaattaatgttcttaaaacaagacccgtcaataaaaattgaagacaccgagccaaagttcattggctaaaccatagttgaaaccatggtcaaatcaacagttatataattttaatattatatattaagtaataaattaacataaaagaatcacatgggtaaatttttaaaaaaagcataaaggaccacaatacaggtccaacaatataaaaaaatatcaatagtagatggttaataatagaacatatgtagatctttatatgaagacctttattaagctcaatataattttgagcaaataaaaaaaacttaaaaagtgaaaataaaattaaaagaaaattcttttctaattggtttcttgcctgattttcattgattttagactggtttgaccagtttttcattgatcttttgctctcctgattttttagttttttcgaagtgactttactgattcactggttttcctatcaaacctgctgctccagtccaaatttatattctatggatataacaatgttagtgtgatgtgcattaatggccagggtttgtctcattatatagtagttgtcaatcttatgagccagttttctaatacatcatgattttctaatttctaacacgaacaaactggatattttgagcagctattagtgacaatgtgaagggagaatttggtgtttcgtatattttgttttatgcttaagctttactgttattcacgtttcaataattaaaatggccagctattggaagcaacagctagagcagttcagccagtgctcgagtttggagaatctggattggctgtggcagatggcctttcaaaccttttaaaggtgaacaaacttccttattggaacttgtaatttagctggactttggtgaatgaaaaatgcaggttaaacattgtaaatctaattctagatttcgagacaagtgaatatttgtgagctaaaattcccttttgatcacttctcaatttttagtttcagtttagttccctaagtttaaaaaaaattgtttttgtccctttaagtgtctttattacgccaaattggtccttctgtcagattaccacactaacaccgttcactttggctgacatggcaaacatccatctaatgtgatatctcttacagtttgccacatatcactatcactaagttgattaagttagtagtaaactaacagaaagaccaacttggtgtaatagagatgcttttagggaccaaagtggaacttcttaaatttgtgacaccaaactgaaactaaaaaataaaatggaccaaaagggtattttagcacatatatgtaaaagggcaatcaagtgcaaaactaaagcaattcatgtgctatttttttcttttgggtctatactgcccatgaaattgttgactgatatgcttgagttgtgaatataccacatgcagtgtcgcctctcagctacaattagatgtctttctcatccaagtgcacatgtccgagctctgagtatatcagttcttcgtgacattttgcatactggttcaatcagatgtagtcctaaacctcggagattaaatggcacccacaacccctcttatcaatacttcaatttggatgtcattgactggcaagctgacatagaaaaatgcttgacttgggaagctcacagccgactttcaaacggattgtctattaactttcttgataccgctgccaaagagttaggctgtactatttccatgtgaaatgaaatcatccatcttagtccgtgacaattttttactagacgtatagaaaaaaaaaagttattgatatgcttattgaactaacgggtttgcaaataagcataattctgctagtcctgttgaaaagagctgcagtcataattctagtatgtttatagaaagctcattttgtatcatgtatgtactgtagctaaactaagtttcaccctgaacttgcttgtgagtctgctctcgatagaacagtcttgtacagtaacgaaaaacgctgtaaccaggtccttttctatattgtctcattttgtgttatgcttatgttgatttagcttgtaatggaagtcatttccaattgtttggattaatgtatgatcaggcaggcttttcttttcttctctcttttaattttgtgagattgttgttggctttcatctttttactagagatttgtgttttttctttattattttcaaagtgcgtaaaatgtttttgttccctggttcaagtggactaaaaacagaaatcaagattaaacgatggaacataagtattgttaactaagtttttagtttttttattattgtttggttattcgataaataagtttttttaagtagtttttaaccttttttaaatcattagttttttttatattttttttatttttattctcaatacatttatttattttcttattatttttttaaaataaatcatgattgtattatttatcattttataatttttagtaatttcaacagttgattttattaaatatttataatttaatatgttaattttttaattaattttattaaacataaataaaaatattttactgttacaaattgcgtatgtggaaattttctgtttaagattttggtggcttttaagttttaaccgctacaaatttgttgtcagtctaaatatttatttttttttaacatttctgctggtttcaaaaatttggtgcttgggtttttttttttccaacattttttgtggtttaattctgctaaggatttgcaacaattaaacattgcttgtccgtcacatcaatttaaggccggacactaaaaacaaaacggaataatttatgaggaattaaaaatagaagtcaagataaaatgaggaataaaaacatattttattttttgaaagtttatacaatattattaagtgaattttgcagtacatttgaaaaattgaaaaagaaggaacatggttataatggcttgaataactatgtttcaaccaatgtcaagtttaaggcaccaggttggtttcaaaactaaacattgtctgatccattgtgttctatcattttctattgtgggtgagtctatataggggacaacattgattctgtgagatatacaaagggtaaattgacaa

SEQ ID NO: 338 - DNA, 4236 bp, Glycine max; identical to SEQ ID NO: 285
  source 1..4236: mol_type = genomic DNA

SEQ ID NO: 339 - DNA, 8721 bp, Glycine max
  source 1..8721: mol_type = genomic DNA
tgtttgacaaaaatgtcaataatttttttggaccaaattgtcataaattttttgtggaaccaaattattgggaagtcttggtatatgggatatgttcatcttttattcataatatattctgattaattattataatttggataaatttataatgattggtacaatgttataatgtttatattggtaaattggtagaatatttattgtggataatttctattgtcacaaacaaattatgattgtcaatcaatattatgattattattatgtttgttttaaattatgctttccaaaatattttttaagtgattattgtaattttatgtttgtaatgataaaacgtgtacaaatttaccctaaaattatattttatcctaaatgaaacaaaatttgaggtctaacaaaaaattattgacatttacgtccaataaaaaatttctaatattttgatacaacacactttttttgatattttggtctaataatgataactcactgatattttggtttaataaaaaattatattttatccctaaatgaaacaaaatttgtaatctaacaaattagttcaatggaaagatactgatatttaggttcaacaaaaaattaaacttactagcattttggtccaataaaaatatagtgatgttttggttcaaaaaaattattaacattttccgaaaaaaaaaattactaacattttcgtccaataaaaaattactggcatttaggtccaataacgataaccaattgatattttcgtctaatttaattagcatgatcatgttgagaatcaatttggtgataaaagataaaaattaatagatgaataaatttgtcacactttttattttttgaaaactaaattttaaattttaatctttcgtgaacaaatttatccgtaaaaataactgttttaaaaaaatataatcatattttatttttggtccgaatctgttgcttgacttttggttcttgttattcaatcaaacattctaaaaacatagaaccataaacaaaacaatattgcaaaaagttccctagacgagcttcagggaattacagtgaacggtgcaacaaagtgaacagggtcgtcgtcgttgcgcggatgataagcgagaaagacaccgaattccgataatcaattcttaactcacataaagacctaaatcgatatcatcgcaattgaaaatcaaaccacatacacagcgcaatggatcccccactccaattttcctctccccaaaaccccaaccccaaccccaaccacaacgtgttcttggacccaacctccgattcaatcccaaacctcctccaaaacccgatccactacctctccttctccgtccccaagaaacgccgccgcggccgctcccagcgcaatccggcgtcgtttcgcctccctcctctcaccaccctccctaccgccgccaacccttctccctcagcctccgacgaaatcatcttcatcaacaaagagcccaaaaccgaagccctaatcgccctcaccgctgggttcccagcggactccctcacggaggaggagatcgacgccgccgtgctcccggtcatcggcggcatcgagcaggtcaactacactctcatccggaaccacataattgccaaatggcgcgaaaatgtctccaattgggtgagtaagaaaaccttcctcgattacattccgccgcattaccattcgcttttggattctgcgtataactaccttgtctcgcatggttacatcaatttcggagtggcttcttcgattaaagagagggttcccgcggaggcgagcaggccggcggtgattgtcgtcggcgctgggcttgccgggctggctgccgcgcggcagctcctgaggtttgggtttaaggtgacggtgttggaaggaaggaagcgagccggggggcgggtttatacgaagaagatggagggagggaataggatgtgtgctgctgctgatttgggagggagtgtgttgactggtacattggggaatccacttgggattgtggctaggcagttgggtgagttgcttcataaggtgagggataaatgcccgctttattgtgtgaacgggatgccggttgatccggatatggatgtgaaggtggagtctgcgtttaatcggttgcttgataaggcgagtaggctgaggcagctgatgggggaggtttcggtggatgtgtcgctcggggctgcgctggagacattcagtcaggtttataaggacgcagtgagtgatgaggaaatgaatttgtttaattggcatctcgcaaatttggagtatgcgaatgcggggttgttgtcaaatctttcgcttgcgttttgggaccaggatgatccatatgatatggggggagaccattgctttttgcctgggggaaatgggaagctggttcaggctttgtcagagaatgtgccgattttgtatgagaagactgtgcatatgattaggtatagtggcgatggagtgcaggtgactgcagggagtcaggtgtttgagggtgatatggcattgtgcacggttccattaggtgtgttgaagaaagggtttatcaagtttataccggagttgcctcagaggaagcttgatggaataaagagattggggtttggtctgctgaataaggttgccatgctttttcctcatgtattttgggagatggatcttgacacatttgggcatctttctgatgatccaagtcgtcgaggggagttttttttgttttacagttatgtaactgttgctggtggtcccctgttgattgctttggtagcaggggaagctgcgcataagtttgagagcatgcccccgacagatgcggtcacacgggttctccaaatactcaagggtactcttcttatgaaagctattaccttgatattttctttcccatcatacttcggctatacaattaaaacataggatgtccctacaaaataaacagaaaaataaattagaagaaattgcatgtctattattaacatagtttacatgttttcctcaatttcctaacatgtgtgtgggccataaatttatatatttaaattaagttgtatcttttcctcattataattcagcagtcatacctcttaattttcatttaaaaagattccaaacttgtcataaatttcttaatattgattatattgattctattttattttaggaaatatttatgaagcaaaatgtttatctctctacaggtatctatgaaccaaaaggaatcactgttcctgaacctatccaaaccgtatgtactagatggggcagtgatccattctgctttggttcttactctaatgttgcagtcggagcttctggtgatgattatgatattttagcagaaagtgtgggagatggtagacttttctttgctggggaagcaaccactaggcgctatcctgctactatgcacggggctttcctaagtggtctaagagaagctgctaatatggcccaccatgataatattcgaacactgaagatgaaagttgataaggccccttcaaatgctcattcctgtgcttcccttcttgcagatttatttagagaacctgatatagaatttgggagcttttctgtcatttttgctcggaagaatacagaccccaagtcaccagcaatcttgagggtaacatttaatgaggctagaaagaaatgtcatgaagttgcaaaacaggaccaacaacactcaaacaaattactttttcagcagcttcagtcacattttaatcaacaacagcagcttcatgtttacactttattgtcaagacaacaggttattgacctaagagaggtaagaggtggtgatgaaatgagattaaattacctttgtgaaaagctaggagtgaaactggttggaagaaaaggattgggaatgaatgctgattcaatcattgattccattaaagctgaaaggggcaatcgtaagcccgtttcaacctctctggctcttaaaccaggtgggtgatatacataatgaaatactgtttttatcatttctatataaatctttttgaaaacaggaaataaagtgaaagcgatataacgattttgtaattaattatgaagtcataaaatgaaaatggaaagtggaaaatgttttcacaaaccaaacaagctgttaacttttctttgcctgtcattttttttattctttctcctctgtggatgcatagttgctaaagcaatttaaataatatttttcttgatttatgaaaggggtgtcgtcaaagctaaaggcggcgggcattatgaagcgcaagttagtcaggtttgagctgaatttctttatatttatataatctcaccatctcaaacatcattattctatttgacgtgatattgtaactttattctattggtcaactcagaagggcaaaagtggtgaggaaaagcaatgggtccataaatgtgcggagtgccatcaaagtatctgaagaggttaaaataacaaatcaagtgcttcctgatgtacctgtttcaggtaattattttataaagaaaaaagtaattttatgcacagtatcccctcttaaaatgcaaattctttagagttacattaattgtattataatttgttttaagttcttgcattttttttactaagttcccatagttgccttcgttatgaaatactattaatattttttccaaagctaaattaagatactgctgacttttagaacttggactttcagtttggcatgcttaagatgagatattgatgttgatttttgtgaagagcttttagatactgtattttctatgtttgttggatgtatatatacggtcagaacttgaacctgaatgtcaagagtcctgaattcttgttattttattgttggcttttatttttttcttaaggtatgctctcaaaatattatgaggctttccctatattccacggtaaaggctgtatgttatcaagcagaatacttgtttcccccttcctatctattctgctgatttgctatatcagtaaaagattaaattataataaagttggatggttatgttatccttgtgtctctcaccctctccctatacagcaacaacaacaacaatagccttatcccattaggtgtggtcgtgtgtaaacatgagagtagtggtatcttgctagaaacatgagtagtgggttgcagggtctatttttttatccttaagggcactatatggatggagtcatgtattatattgttatagataatccaactcgttactatctcatcagccagctgctttccatactattttattccccttctgttcttaaatgacttctcattattatctcttatctttacacgctaacaaacactttaattttctcactcttctgcagctgagtatttgcatgttcatatatatatatatatatatattttatatttaggcaccctaatttattgctttagtgactttttttttctgtttactatttggactttggaggataacttacccttcccctagttgcacctgacttttatgcacaaatttttgtatctcatcaaatgaacaagggtatatcctttacacccttaataaaatttcacagattgccagtgtaacttaaattgtgtgttgtagttgttaaatagcagttatgatgctgccataacataaacggattaacattgtgcttttgatgcccactttcacttgccacccgctttgtggtactttccaacattttccattgtgcagctgccattgccatggtgaatttgtatctttgttttttattctttctaaatcctttttgagtttcaaatagggtttttaaaacctttgttcactcatctgtgttagcttctcccaatttctcttgggataatagccactcatcttctcccttcaccatctgttgatgattctgactccaacaacccaaactttggcaaccaccttctgagttaaatatctcctttcctcttttttcatcttttttttcctgcttcgcaaatcacaatttcttctctatttttcttgtttctttatttttttttgtcaccaattttttttctccttttttttgtttctcttattttgttggtctgtttattttttttccttcatcattcattcacactactaggacattttttgttttgaagcttttatatttcttgttagcattgttatgagattttatgcttatgttttgagactttgattaattttatttcatagaatatattcgtgagtttgttgtcttcattttatatttgtttttagttgttattttttgtatttagcagacttgtaacacatacagtcacacttattgtatggcagattttggcttttcaccatggaccaacatgcaattaataacattggggtgctttaatattatatagtactttgttttgtgtagttatgcagtctgtctgtatgaaatactaacttcataaatatttctagggagcaatcaaaatgacttgacaaattcataaatggatggccatcgttcacccaggaggtgagacatacctaaggactctgaatccagatagtttttcttggtttaaatttttcttgtattatatgcaataagaaatgaagtcagcagcccaacatttttctatcttattcaattcaatgagaatttcaaatatattatcatttttacttttctaatagattgacttttcatattaaattgcagaaagactaagatgccattcaacttgttctgcccgagtgcttttcttggatcatcctatgtcttggatccttggaagattatctgctatatctcttttgacctttttcttaatgaatggtaacttgcaagaaaatgcaagggaaagccttgcgcaaagcaaaggttgctgccttgtaacctagaagtcactggttcgaatcttggaaacgaacaacatctgtgggggcaaggttgtgtacatctactcttcccagacactacttggtgggagcctcatgcactagggtaatctgtaagaaataggtttcaaagttgtggtaaatatattttgtaaaagaatagatcatcttgcaactaaagttggaggatgttggctcttgcatgtacagaggtatcattctctttgacattctctttgacaatgaaggcaccagtcatctactgaagttttcattcatcaaccttgtggtatgtctttggtggatacagtatctatctgtagtgtttggctggagcatcctcactgcatttgttcaataaagggaagatggtctcttgcatatacctaaagtgttgaagctgatggctctatgatgcagcaaactggcatgtttatatctcttctgaagcaacaccttggcttggtctatgatatgcctgtaatagttagatatgcttgccacccaagagatatagggtgactttgtgaattgggtggctgcattgtgactagtctcattatgctcgtgctcatgtttctgcaagcaacaccagccgttctcaattaggatcacagctacctcctacctgtaaaggcagccaatgaggaacagaaaataccgtttttacaagatattgcactcatttgtgcttgttgtatgatgtatgaggacatgaaaccgcaagctgtaacattctgtgacataagattttgttagaagctgtattttttttttttgttcattttttttagctagtgcataaatgttgggtgccactttggttttatgcagggatggtaattggatttgaatctaagggatacctagaaaaaaatacgaacggccgggaggaaaattacccattaaataggcttacgctcatgtatcagtttcaatattttttgcgacaagtgtgagtatgataatcttattatctaatctttttaatacttgcatagtttttaaaattagaaatttgacttaaaaaatcataatgaatttaaaataaaaatgttaagaataattatatattagtgttattttaaataatactattatacaaattattttatataatatttatcactcattattatataataaaaaagatatttgcgttttctcgacttcaaaaatcaccgatctttattttcgtccttttctttttatattccatcaatctaaacaatacaaaatttcacctatattatggggtacttctgatattttttaatacacttttactattagttaaattttgttaaaaaataaaaaaattataagaccacttaaatatgaagtaggactcacaatcttttgtgattttcgttcaattttaataataaaagagtatgtttagattagtgtttttaatattttcctacttctatttccttatttttttcttcatttctttcctttccattttctttcttatatcactattatatttactttttcttggaatcatttttggattagtatggtatcagagcctctcaacatttcaaaagagggtgaatatgatagtgatattatgaggtgagtaagagagaattgaagacaacgatggaacctatcactaataaaccaaacactcaacttgttgttctaacctctgtcctttctctacctaaagttgctaaaaaaactacttcaaaaactgagaatatgatagaatactcttatgtcccagaagatgcacaaatctttgagactatttctccccttcttagcccatacaatatctttaagagatagagatctatactcaaatcaatctcccgaatcatcactacaaaaagacctccagttaa

SEQ ID NO: 340 - DNA, 7343 bp, Glycine max
  source 1..7343: mol_type = genomic DNA
gtgcttttcacagtcccccatggacccaaaagggaacaacccagaatgacctgcaacaatcataacccaacacctggatttacaaatgttcccgtgattttcttacaaaaaagttcaatgtacttataccgtgttagtaattataaattacagtactaattactcaatccagtttaaactaaataaataattattctaccataattatagattttataaaatataataaaaaaaatatatctaattaaacattaaatatattaattattgtcatgacattaatgtaaataaggatccttttattattaagattacattaactttcggtttgtccaattacagaccaataattcagcattgctcactatcacagttcacagctattttttctacttggcttcggagagcattccactaactgagaattttttggtacacaaagctacgatattcgttccttcttctaatttcagccataaaaagagaatttttatcattatttttttaactgtttcttttatcagaaaaaaattctgattaattctaatttcaatcaaacaataattaagtctaattaataattatttctattaaaaatcaaactcgaataatactcaaatcttttcgtcttgactttaatatattaattacttaattacaaagaaaaagaaactagaaacattataataaaattattttcgacaaactttttcataaatacaaaatttcaaatatacttaaatgcgaatatcaaacgttgtacaaaatatctatgcgcataagatattttgggcgcgctgttttctgtccccaattaaaaagaataaacagaaaccatgagcggaaaatattaagaaaaggaattagtatttgattaggtgtcagattgccgcttaaagggaataaatcaggtggtgagtaggacgatctttggtgagtatgagaaaaaagaaaagaaaagtgttatgtttttatattataaagtaagtgccatgtaagtacccataaatgtaatgcattttatccggaaagagtagacttggacaagaaaatccagttaaaaaatttagtgcaagaaaagggttctagttctatccaaagggccccacatagttcgcacttttctctttcttttccttatgatccattcttattctttttcctccctcttcttctctcatctatgaggaatccctaaacacaacaacgctgcatctaatccaattctcgtacgtgtgtgtgcttttttctctcctcgaatttgttccctctccttggtcccctcccaacatcatcctcttttgttccgaaattctcgggttctctgctaatttccgccattttttttgtccacaccaagtacttgtgctctgaccggcttccccttccgtaactcgtcactcactaccgcaagctctcttcggtagtcttaagcaattttattttcattatctttttccctttctcttgatttgaattctgatatttttgaattattgcatctggcagcaagatcgagcccgtgcataggttctccgggtacccaattgaaaaaagttgagatttgatatcatatccagaagtgagtagattcgatactcacgagttcagttctgtacgtccatcacaatcacttgcttgtttaatttgattgtaaattgtaattgctattgtgtgagtgagattgatttggatttgtggataagagaatcatgtattgcaatttaacataaaaagacaagaaataaagggaagtttttttttttttttttattattaggattaggattaggaagtgtaaggatgaagagagggaaggatgatgagaaggtgatggggccaatgttccctagactacatgtcaatgatacagagaagggaggcccaagagcaccacctaggaataagatggccctctacgagcagtttagtattccttctcaaaggttcaattcaggtgttctgccactcaacccaaatatttcaagtaatacagttccccctgcatcctcaagtctggtaatttttgcattctgttactgtgacttttgcttatagtcctaattattgttgttatgatttttgtttagtattttttagcataagagaagtttaatttgccaatttgtgattcactgattctattcctttgtatgttctgactaatagttggtgttattctggttttgtgtgtgcgcgcaatggttgtgtttctttctgaatgcttggaattggattaacatttttgcagaggactgtccctgagagaaattgtgtctaccctgttcatttgccaccacaaagacctattcatcgagctgaaaaatgtaactcacgccaatcagaagggacaaatttgagtgcttctcttgaacagagaaagaaggtagatgaagacgactttagggttcctgtatactttcactccaggactggtcaatgtaatgataagagtgttgagagtttcaatgggaaaaaactcactcctacaggctctaggtattttggtggttccatatcagggcaaagtgattgtgaaagagatccaaagcagtttggctcctcagttgtcaatatgagaaaagatgtcagaagtgagattgatgtgcttccacaagtaagtacaagtaaggagcaggcatcaatgtctgtcagaagcatatcgactagagaaaatatccacaccttactaaggcaagccaaggtgactccgaatcgggagtttcaagattgtcatgtatcaaagtttaacagattacaacaaggtgagacttgcttacagctggagtgtggagtggagtcccgatccaatgacattggagataatggttgtcttgttgaatctgcaagggagacagacaagggaaatgcccctacagcaaaccaaactagtccagctgatgcaatcaatgacactgaacatcatgataccaggatgggcagtccgatacagaggggaaacttaaatgaaagtgacaatgcttccaagatctccatggtagaaaatttgtcgacagtgagaatttcgccagatgatgttgttggaataataggtcaaaaacatttctggaaagcaagaagagcaattgccaagtaagtcatgttgcttgccaatagcattggcggttcctatggtggtcttaaagaagtattttccttgtgaaatatttttctgtcatataaatagtgaattattttaattgcttggacctgacaagttcttaaatgttgattttgtgaatattaatatccttaacttgctttccataaacaaccataaagatttagaatacaaaacccaaaagccctatttttggtggaagcttgatatgtccactgattttatcatcttgattttggtggaatggtgaaatttcttcatacctttcttatttttttcttcatggttgattagctaaaatatgtaaaaaaattcccttggaatttttggaaactgttacttaatgatttttgttttctgcctttgctacaaatgtaaggtatcctttatgcatcattagttatacactaggcaagtgggctgtatgttttcatttcaattaagttgctgtatatgtggctttgaagaaaggaaatttgattgtcctggggtcccttctaatttttctttttgtacattcaaagtccttagtgggatatggctattgttgttgctgtatacgttcaaagtccttaacagtgttttaatggtgggtactggttacaacagggcagtgagcagtcttaatgttatactatgttggaggggacccttgtgacagcatatcatctcatgattcactgtcttctagcaactggatgttggatatattcctgtcttggtttcctcttgcttggttctccatgtcaccactgggcacttttccttaaactacactgaaggggaccaagtaatggaggatgatcctggatgtatggtggtaggggacacttggagagttatgatgagtcctcaattgaaattatgatgacaaggggatttctgccccccccccccccccccctttctccaacttatctagtgtcttggttttctattttcgattttgggttgggatattttttatgatacactgttgttaattaaggtgtcctgcctctatacctctgactgatttcatatcatatacatgtttttttttatgattttgatgtatatgtgcttatccccaaccccagaaaataagtttgaagttttacaaatttgtccagagtagttgatctattgtgactactgaatgctaatgttcccacaattgtatgccccaatctccttgttatctagtctttatcctggacagggacaaggaaattggcaaatatttcttttgaattatataatgttttttcggctttaattttaatgagccttaaatacaagtttttattgtcttaaaccatgtgagaaggatttttatgatgtaacataggcacgatatctttgtgaaacagttttagttatcatatttatgtcttgttaatatgtcgagtcctcctgaaaaaaccatgttaagatttgtatgatgatatgatataaattgtagaacggaagatattccgcttaactgctaaccggttttgtgatgtgatcggagcctctgattttggtagttagtggtttatatatcggtgcttccatgttccaacatgattatagatagctccaaacgcttaatatttcccttttatttcaactgtatatttctcaagtcctaataggacgagtattgtgcaattttcttgatccaactcctgttcctctctacagtcaacagagagtgtttgctgtccaagtgtttgagttgcatagactgataaaggtaaattatctctggcactgttcagcatctcgtgttagtccaaaatgggaagcttattagcttttcttgcacacacactcttggagtctgttcatactgattaattcctttttatttaagcaggtccaacagctaattgctggatcaccagatattttgcttgaagatggcgcttttctgggaaagtctcctccaaagggatctactcccaaaaaacttgcacttgaatatgttgtaaaacctcggcaacaaaaccttaagcgcaaagatgattctgaaaagctaaatcataaaatggaatgttctgcagagaatgcggttggcaaaacatctctttcatctgtgaaagacggtagccacctttcaaaatgcacccctttccctggaaatcagcaccagacaaatgtggctgctgacagtgggatgggtccctggtgtttcaatcagtcaccacctgggcacccgtggctaattcctgttatgactccttctgaaggacttgtctacaagccatatccggggcctggattcacaggaactggttgtggaggaggatgcgggccttttgtgcctgctctgttgggtggttctttcatgaatcctggttatggaatcccaacttctcatcaaggagttggggttccaccagacactcatcctggcagtcatggttacctccctccatatggcatgccagttatgaattcatcaatgtcagagtcagttgttgaacaggggaaccaattctctgcactaggttctcacgggcataatggtcatttacccggaggagggaaagccaatcataacacaaacaacaaaagctcttgtaatttaccagttcagagaaatggagcaatatcgcatgtcctgaaacatcagacatctaaggattttgagttgcaggagacttcagccagtagtcctagtgaaatggcacagggattaagcactgggcaagttgcagaaggaagagatgttcttcctcttttccctatggttccagcagaaccagagtctgttcctcagtctcttgaaactggacagcatacgcgagtgatcaaagtcgtgcctcataaccgaagatctgcaactgcatcagcagctagaattttccaatcaattcaagaagggagaaaacagaatgactcagtgtagtgatggttcaagtagtttgtctagttcctgtactttcttggagtatgtcatgtaacgagctgttgtatttataatttttgttttggtttttgaccttgttacatacagcacattggtatgtagatatatctggcatatcaaaactggtcaaaatgtaacattattttatggtatcatgttgtttccatacataagtgttcgttttacacagtagtaattgctttacccgaaagagtaggtgctctgcttcctctgtgcatgggaggaggttttatattgcttgcctagaagactagtgattgtcatacacattagctgttattctaattgattgtttcatgtcatcgatctgccagtggaaatattactccactcgatttggatgtgataaatatttagtgtaacatcttttaacattttcttcccatggtaagcgtgcacaccattccaattattagctttagtttcttgaatatgtaattacaacatatcgttaaatcacatctagattctacacaggagtacacgacttgatgatttgaactggactgaaggagaaaattttaatcgtttcgaattttaaaattacaaatctaatgatatcggtttggtatcaaatttaggaacacgtaaattgtgtaaacatttttttaaggatacactttttgttataaattgtgtaactatatttttttatttatgtaattatattatcttaattgttgagactttcatgtttcaccagctctcttctattattttttttcaatttgctatgtttttttgtttcattttactattttattttatttatagacctaatgtctaatgactccatccaattcgaatatgatcaaattaaataaaataaataaataaattttgagtcaatccaaacaaaattgatcagtttgaatctaaataaacttgatttaacctaacccatgctcaattctattccaaagcacagaaacatcgaataaatttcacattctgttaaagacaaatattacattaataatttaatatagtgtaagcaactattaaacagcgacagtttggccgagtagtctaaggccccagatttaggctctggtccgaaagagtttgggttaaaatcccacagctgtcatataatgagcttcgttttttttattaaacttttgttgatattgtaaacaagtttttagggattattttctttttacgtgacttttaacataaccaacaactagttttaaattcatactgttaattttgagattttgatggtaaagacaaactctagacaaaactccaacattaacaacagggatgtttaattatttcatcttctaaaagttc

SEQ ID NO: 341 - DNA, 5106 bp, Glycine max
  source 1..5106: mol_type = genomic DNA
gtatttgtatgaagaataacagagattagaaagcaacaatcattatgaaagtactattattatagaattctattaattagaaagttgattgagaaggttagttcaaggaagaaagggattgctacatttagaaggggccgaggacaagaccttgaaccattatagaagagaatcttaggctaataatatatttaatagcataacatatatgctttaattttagaatatttattttttaatgatttcaatttgttcatatcttaagattctaggaaatcctagaatcccttcagaactcaagaaatcctaaaaaagaccttaaaaaaatcttaaagccagattagaacccaataaatcctaaaaacctctattaagtgcaatttggtgtaacctaagggtcacacttgtaattaggttcagaggttaaaagctcacccattttaagtagtcatcaatcgagtaatttatagtccctaaaacattgatcaacagaaagacatgaataccctattatacttggtcagtctatccaatcaagtttctttcattattattaccctttcaaaaaacatgctttgtattttttaaattacttatcacctcaattcaccacaagttaatacatgttttaattatccaaaccattactaccttaattggttagacagcctattttgattttcacacctttattttagggtgccacagccaatggcccaataccaaccaatgcaataagcaaaataaaaaaaaaaaagaaaaagaaaaagaaaagtaaaagtaaaacgctgccgtttttgaagtgttggacacgcccacgtggcggtcatatcagtggggcccaaagcccacagccttggttatggagggccctctctctctctctctctctctcttaattattccggccagattccgtcgatctgcggccatatttatttattattattcaaaacgaaacaaatataatataatcttcccacgtttatatatacccactcctatccctctcctcatccttaacaacatttcacgcttcctcctcctctgtttctctcgcacactctgaccctacgtcgttttttctttttgttttccaaacacacacacaccgcgtactacaactacaacaacgccgtgcctaatccttaagaataacaaacaacagccaaccatgttgcattgtctcaacacttcggggaatctaggagccacctgttcggacatgacagtgttggaaagacaacgggaagcaaccatcaagtggcagcaacacctccagaacaaccaaccaccctacttaacggactttaacgttaacgttaacgccgtcttctcttcttcttcttcttcttctcagagtcagggcctggtcatgaatatttgcgctgattccgcgctcggcgaggtcctaactcactccgtcaaacccgacccgggtgtctggcccgaattcgacgccggattcggatcctcttccggttttctacccaccatttcgccaacttgtagcagaggcggagacttggtttcacccaaggaaaacatggccagtgcgaaagaaaacactaagaagagaaaacctcagaactccaaggtagtagtacttttttttttattttagatgtcaatgttagctgttacttttccagataaaaaaaaaaatgctaaccatcgaggttatgttatgagtatgctatggactacggtaaagtaacggtgaggttttgttttgtttaggttgttgcggcgagtgataataaacaggacaagagagtcaaagcaagtggtgaagaaggagaatccaaagtaacagagcaaaccagcaacaagaatggcaaatccaacgcaaataaaaacaacaacagagaaacaacctctgcggagacttccaaggataattcgaaaggctccgaggttcaaaatcagaagccagagtacattcatgtccgagcgcgtcgtggacaagccacggatagtcatagcttagctgaaagagtgagtaaaaattaattaatatactatagcttatttcttataaaaaggaatggagatagtatattgtataattttcttaaagcgtttttgttttgttttgattctctctacttaatgcaaatgttttgtttggtgcaggttaggagggagaagattagtgagagaatgaagtatttgcaagatttagtaccgggttgcaacaaagttgcagggaaagctggaatgcttgatgaaattattaactatgttcagtctcttcaacgccaagttgaggttagagttagttagttactccctccaacttcattcctattcgttagttaaatattattgctccataccaaattaatttactagtctactgttggaatatgctttcaacttttgaagttcacgtgacttattttattgtatttattggcacatacagttcttgtcaatgaaattagcggctgtaaacccaaggcttgacttcaaccttgacgaactatttaccaaagaggtaaggtcattgctgataacacaattttttcacttttttcttctattagtccgattaaataatggttgtggtttcctagtgtcctttgatattatgagaaattacggataaatgctgccagtataattataattaaaaaaaaaagccttgatgttacaacaaaaaaaaaaaaatactgggtggtggattgttttttaaaaccttggtcgaattatattcaaatagtgaaaagattagaattttgaacttgtttatgcattcttgttatttttaatgacataactcttatgtttgatttgattcaattcccacaggtgtttccttcttgtgctcaaagttttccaaacattgggatgccattagatatgagtatgagtaacaacccttcgtatctaccatttaattcagcgcagcaacttgtatcgtgctgtggtggactaataaacaacatggggataagccctccaaacatgggactccgaaggaacattagtactagccctgtacctttgcccgaaacgtttcttgactcgtcctgtttcactgtaggtttttttaccctctcttgtgtatgtaatgttcttctaatgattagtcttgtccaaatattgatctgaatttttttgcactgcagcaaattctaccctcctcaaattgggaaggtggtgatttccaaagcctttacaacgttgcttttgatcaagggcgaacagcatcttttccttctcagccatttacaggtagctacaaatttgtgacttgtcaaaatcacttttttccttagcctgatatcctaaaagtagaaagtagaagcaaagcagagtggattttcatgggtgatagagacccgagagccccacagattactgataagtcctttttccatcaaaatgaaggaattttttttaaaagggatcttttaatcattcacccatcaagccagttgtctattttatttgcttcttattacgtccctttctttcccccaactttcactcctacaaagtggcggtaaaggttttagctgcttgactcaatgcatcattcacggacatatatcatataacaaaaataataataaaaaaaaataaacggttcgaattgctatatataacaagttgttaagttgtttgtgatacaagacaaattttacttgtgaggttggaaatgtatttagtgaaataaaataggtataaagagcaggaagcttctctttttgaaattcttctaattaaggtctttggatgatgagccaaggatcaatcgttttcttgagactttttggccattactacacaatcacccttaatttaagcaatacaaaaatattggtgatatagaaagttgttgaactgggctacttctgaatgtgaattctaaaacaatgtgttgttttatgtctcttgcaggtctagttgaagctagcaatctaaagatggagatgtaaaccagatcgatcatccattataatttgttggtggattaggtcactcggagtgcctttgtcatgattttttcttttttcttttttcgagtacataacatatattggttgtatactgctccgtagaataaataagatcatattaatacctgttaacttcaatcacctgcatttgcacgtttaaagtactatatagatgataataaaaagaaaaataaaataaaaatgaaaaggttgatcgcgatggtcacatgtgtgaccagccacctaatccaatgggcataagggtgttgatggcaacctaccactgctttttcccctctctctataatacgatttttggtaaaacaaacgaaacactaactggaataataataataataataataataataataataataataataataataataataataatcacgtaattcttcggttgtcaattttttacaaataatgttgggggtatcttttatccatagttggttgatagaattggggtgactaacagtaatgttttaattcttttttgaggaaaatagatgctaataaatttttaagtaggcaacctaactcaaaccaacttcgctgcagcaatggtggtaaattaaataaaatgttgagattaatatcaacctttaggttaaataatcttctttttttactgataagattaaatagaaatagataaataggatttggtatcaaagtttattgaaacagctggatgataataaaatcaatgagcgtaaaacttttagagttggacttacattagtgtaatttaaaatggtgtttgtattattctccaattataattggagttttatcttgataatctaagtagttaaatttttttgtaaattatcgagatgaaatttcattagttctagttgaagaaacaacaaaaacaacacatgagatattatatttgttttttaatcaaataattttcacaagtaattcacgtttaactagtagatttaaaggaagtgaaaggtgagattgaagattaacttatacataaaataaggactttacttttctaaggtgaccatctatctaaacataacatctatgaaatgggtcttcgaaagcatccttctccttaccagatgaacatgtcattcgtcaggattgtagaactcaactctta

SEQ ID NO: 342 - DNA, 3750 bp, Glycine max; identical to SEQ ID NO: 291
  source 1..3750: mol_type = genomic DNA

SEQ ID NO: 343 - DNA, 5274 bp, Glycine max
  source 1..5274: mol_type = genomic DNA
ggatgaaagtgtcatgaaaagaagatatgttgcgttggaaagtcttgagagaacaatttcacgggaatgtctagcagataaaatttgattacagacgagacaacgcgagagaataagagtcgctaggatcaataaattcctgtggaattggttggtacatagacaaagtaaacgccttcccaagacatttttcacgtactaaattaaacttctactatttggttcataatcgtaacaccgccacctcaaaacacaacgtgaacgacaatgaggccaaaagttaacctaggcaattaccacgtaagaagagtgttggttgtccgaattttcatgcatgcctttgcctttccaaacgttcaaatcaggccatcataatcacatagctaagccaacccaaaaaggccactctcacagttgtttaagtaaaactgtaagactgtgaggaccaccctaattaagtatacaccatcacatatatgagcaaacaagcgacgaacccaaaaaataacagtcaaatcaaaggtcaaacctcattttctcaatacacatgaaaaattatagcataaattcaaaatcatcataatcccgattacccttcacataaaagataacttattattattaattctatacaaattaaaaaaaaattaaattaactactaaataaatgaattaaatgatgtaagattatttcaatttaactaataattttatatttaaatttttgatatacatgtgttaaatattcgaatataaaattttattattcataatcttattctactcaaatattataacctcaatactaattaatcatgtgtcatgtaaaaaatgattaacactgtaactataaaataatttctcttcaatgaaaccttctagtttgtttgggggcagtccagtttcatagtaaccaaatggaaagtaaccctgaagagtttcaagaaagatctaactgagacacaaaaggaggtaaggaatcccaacccccaaacagtctcgggaaaaacacccaccccggaatcaaatcagaatgatacagaaaggggcatttcgggaaattaacctctctctctctctttcgccacctttatgccttttgcctttatttccacccaaacagtacaacacacacgcacccttgcactcttcactttccaacccccatggatccggacgcattcaccgccagcctattcaagtgggacccacgtaccgtcctcccacccgctccggcgccgcccccgcgcccgtccctcctcgaatacgcgatggctcccccgccggtgaccacggcgttccaccctgcaaggacggcggctccgcgcgagctcggaggactggaggagcttttccaggcctacggcatccgctactacacggcggcgaagatcgccgagcttgggttcacggtgagcacgctggtggacatgaaagacgaggagctcgacgacatgatgaacagcctttcccagattttccgctgggacctcctcgtcggcgagcgctacggcatcaaagccgccgtcagagccgaacgccgccgcgtcgaagacgacgacatcaagcgccgcaacaacaacagcaacaacctcctctccacggacaccaccaccaacgccctcgacgccctctctcaagaaggtaccatacaccatacaccatacacttattttaaacctaattaacctacacacacataacacactcctcttgctgtagttctaactgtgtcctcgtttatctttttgtgtcattatgattattattatataatactatataatcgttttagccaattaaatttggaacaaaagtttgagttgctaatttatactactgttatattaaactactgttctatgctgtatcatatcataaataaagtcagcagcagatactagcatagctaataggctgagcaacaatttgtttgttattctatgagtactgtatggcatgaatgagatggacttcgtgttatgcgtatatgcaaagaatatctgttccgaaacaacagtctcttctatatatatacacacacacacacacacgttgaagaattagtctttgactctcggtccagaagaattatgtaaatactatatgggatatgatatatgtagggttgtcagaggagccggtggtgcaaggagagacggaggcggaggggagcgggggaaggagcacgtgnnnnnnnnnnnnnnnnnnnnnnnnnnnnnnnnnnnnnnnnnnnnnnnnnnnnnnnnnnnnnnnnnnnnnnnnnnnnnnnnnnnnnnnnnnnnnnnnnnnnnnnnnnnnnnnnnnnnnnnnnnnnnnnnnnnnnnnnnnnnnnnnnnnnnnnnnnnnnnnnnnnnnnnnnnnnnnnnnnnnnnnnnnnnnnnnnnnnnnnnnnnnnnnnnnnnnnnnnnnnnnnnnnnnnnnnnnnnnnnnnnnnnnnnnnnnnnnnnnnnnnnnnnnnnnnnnnnnnnnnnnnnnnnnnnnnnnnnnnnnnnnnnnnnnnnnnnnnnnnnnnnnnnnnnnnnnnnnnnnnnnnnnnnnnnnnnnnnnnnnnnnnnnnnnnnnnnnnnnnnnnnnnnnnnnnnnnnnnnnnnnnnnnnnnnnnnnnnnnnnnnnnnnnnnnnnnnnnnnagctgagatgatgaaggggaagagaatgatgaagggaacattaacagagttgtggtgtgagaggcaaagagaacccctttcatcgtgacagaccctggcgaagttgcacgtggaaagaagaacggtttggactatctgtttcatctctacgagcaatgccgtgagttcttgatgcaggttcaggccattgccaaggaccgcggtgaaaaatgccccaccaaggtatattcattcttcttcgttgagttcttcccataccataccctaacccccttcgtttatgttaatttgtctcctccctcgtgcctttctgcttcttctgatcactctgactctgctactcacttgtgttgttgtgttgttcccttcatgaaccgtttgaataatactgtgttgttgtcaccgtgataaaattgtcaagttccacggaacacgtgactagtcagggactctcgtgagggggtccaccttcccctttaaaactagattttttttttcttctgttccgtacgagtgaagtgaattatccagttacaactcttagctcctaacctagcacatccacccgcaagtcaaagtcatgcatgttccccaatttcccccttccacccactggatcctcgcatgccctcatacgaatcccattcgacgcgtatctttgtgtttgtgattctgttaatttcatgtgcgtgtggatggggtacggttcttattattatgttactattcctattgctgtcacaaaacatacatacatacatgtcagccgtattatttttgttaaaattagtcaagcaaaatatgttacactagctgccaaatataaccaacatggaatggttaatacttgatatgcgtagcataaacaatgtttgtcttttccaatcgctagacaaccttatatctataacataatcaactcttttaaattctaatcatgtatatcacttgtaatttgatacttgtcttttctctttaaatatatcaaaatataactcattaactaatctttgatcatacaacaacattgaagttttgtcgtgattgataatttttggcatcaagatgtatatatatatatatataccaactaaaatgtgggagtgcaggtgacaaatcaggtgtttaggtacgcgaagaaggctggggcaagctacatcaacaagccaaagatgcgacactacgtgcactgctacgccttacactgtctagacgaggaggtctcaaacgagctccgaagggcgttcaaggagagaggggagaacgttggggcgtggaggcaagcatgttacaagccccttgtggccattgccgcgcgtcaaggttgggacattgatgccatattcaacgcacatcctcgtctttctatttggtatgttccgacaaagcttcgtcagctttgtcacgctgagagaaacagtgtctcggcttcaagctccgtgtctgctggcagtgctcaccttcccttctaaatcctcatgcatgtagtcgtgtactggtttagtaatcgtgatagttactagttagtaattaatagatgtgttgaatgaacctggctagctcccacgccacgctatgaaatgaaggatacacacttatatatatagcaatggagggactttagattacgtatctttcataaattacttgttttataattgtacttctttggtagcattggaaggacatagatatagcaagggatatatatattctctttggacgcactgaccactcaggatcaatgactctcctgattaattagtggtacaacaaccactaatttaatttcttttaaaaatatatttatttattataatttaaggaaattaattccattaaaaaacaataataacaataataataatcgtttagtagtaaaaatcacgcacatcatacaaaattctatcaagcataaagctaatatactaatcacatactacgtactaaatataaggactattacaaaaaaaaaaaaaaagcccaattttctatattctcacgtgattcttgttttgaaattgttaatgaaaaataaagaatttttaatgtagaaaaaatgagcaatattaaaaaacttttaaattataatttataatacattttgacatttcttctttgtttaaatcatatcttagactctcacaatgtgattattgaggtgattttggtatctacggaagtcataaacaaatatttacaattctgatacggggattttgaccatcatattcaacattgatcatagaagaaattaaggtaaggtttgaagtttatgttttgtgtaaacaacgcatcgtgtgttcaacacaaccctagtgcataatgtagtactgtagactgcccgacgctgagatggaattcatggacaacaatgcacccgatgtgacagagggggtgcccaatacggttttcatctcttttccatgcctagtgttattagcgttcatcatttgcgattgaagcttaacgaatttaggaatgattctcgaagattcatggcattctcttctttattttctttgctttttccgttctatctctatgaattttcaatttctttacagttaggttcggttagattaggataaatcttgatttaaatcttttgtaattataacttctctttctaaacttttctat

SEQ ID NO: 344 - DNA, 8227 bp, Glycine max
  source 1..8227: mol_type = genomic DNA
ttcttgttgggtaaaaaagtatacaaaattattgtaaaagtgttatttttttactggataagtttatatcagctttccaagaagtattattaaactttctaatctaatctttggccgtcacggtcctccaatgtggcaaagctcaattatgttcgcacgaccaaatccctgccactactaattccacctcaccaaaatcagaacaaaaaaacaaagaaagcaaaagcaaataaaattatattatttttgaaaagataaaaaaatctccagataattaattactttaatcatattcctcaaagttaaactctatgaaaagtacttgactaaacaaaaaagtatattgagtgtaagtttggagctcaaaaagatgttttcaaaaggattaagaataggcttcatcacataatgaatggaaacacaaacaaacaagtcctaatatgtttgattatatgtttacctaatttaatctgcggcttgctttattccgtataataatgtcaatgcgagtttgtgactcaaatcagagacagttacttttcttcattcaacaaattaaaagtaaaaactataagttggacaaaaacaaattattaagaacaataatgacatagttaacatgactaacaagtgtaataagagtattgattttaaaatactccataaatacacttttaccgatggtaaactgtagtagtaattttgaagaaagaaagggttttgatcaagttcacttttctttcagaagaagccatcgagcaatcgcgtcgcgtgcgagagaaacgccaaacaagaaaagcagcgttactttgctgctgcacctgtcactgtcactctgtcttcttttttttttcactcttcccctccaaaatttcgctaaacaataatcataacctcatgaaaaaaagtgatagaatagagaagaagaagaagaagaagaagtgatagaatagaagtaactttttctctcttctctgcagtggtggtaatttattttccaatggcttcagcaagcggagcggcgaattcctccgttccgccgccgcaaatccacacctcacgaacaaagctgagccaccacagcagcaacaacaacaacaacatcgactccatgagcaaggccatcgcgcagtacacggaggacgcgcggctccacgccgtcttcgagcagtccggcgagtccgggaggtccttcaactactccgaatcaatccgcatcgcatcggaatccgtccccgagcagcagataacggcttaccttgtcaaaatccagcgcggcggcttcatccagcccttcggctccatgatcgccgtcgacgagccctccttccgcatcctcggttactccgacaacgcccgcgacatgctcggcattactccgcagtccgtcccttcgctcgacgacaagaacgacgccgccttcgctctcggcaccgatgtccgagccctcttcactcactccagcgccttactcctcgaaaaggccttctccgcacgcgaaattagcctcatgaaccctatctggatccactccagaacctccgggaagcctttctatggaatcctccaccgaattgacgtcggaattgtcatcgatttggagcctgcgcgtacggaggatcctgccctctctatcgctggagctgtccagtcgcagaagctcgcggttcgcgcgatttcgcagcttcaatctctccccggcggtgatgttaagcttctctgtgacactgttgtggaaagtgttagggaattgacgggttatgatagggttatggtttataagtttcatgaggatgagcatggagaggttgtttctgagagtaagaggcctgatttggagccttacattggattgcattatcctgctactgatattcctcaggcttctaggtttttgtttaagcaaaatagagttaggatgattgtggattgtcatgcttctgctgtgagggtggtgcaggatgaggctcttgtgcagcctttgtgtttggttgggtccacccttagggcacctcacggttgtcatgctcagtatatggctaacatgggctcgattgcgtctttggtgatggcagttattatcaatgggaatgacgaggaaggcgttggtggtcgcagttcgatgaggctgtgggggcttgttgtctgccaccatacctctgccaggtgtattccttttcccttgaggtatgcttgtgagtttctgatgcaggcgtttgggctgcagttgaacatggagcttcagttggccgcgcagtcgttggagaagcgggttttgaggacacagactctgttgtgtgatatgcttcttagggactcgcctactggcattgttactcagagtcctagtataatggacttggtgaagtgtgatggggctgccctttatttccaagggaactattatccgttgggtgtgactccaactgaagctcagattagggatattattgagtggttgttggccttccatggagattcgaccggtttgagtactgatagtctgggtgatgctggatatcccggggctgcctcgcttggggatgcagtttgtgggatggcggttgcttatattacagagaaggattttcttttctggttcaggtcgcacacggccaaagagatcaaatggggtggtgcaaagcatcatcctgaggacaaggatgatgggcagagaatgcatccccgttcttccttcaaggcgtttttagaagtggtgaaaagccgtagcttgccgtgggagaatgcggaaatggatgcaattcactctttgcagcttattctgcgtgactcgtttaaagatgctgagcatagaaattctaaggctgttgtggatccccatgtgtcagaacaagagttgcaaggggtggatgaactaagttctgtggccagagagatggttagattgatagaaacagccactgctccaatatttgctgttgatgtcgatggccacgtaaatgggtggaatgcaaaggtttcagaattaacaggactcccagttgaggaggctatggggaagtccttggttcacgatcttgtgtttaaggagtctgaagaaactatgaacaagcttctttctcgtgctttaaaaggtatcctttctaacactctggcattctggtcaattcattgagtatatttggtaggagaaccctgtgccttctggaagagcatgccaatctggctatttttgtttggcaaaactatacttgtaaacatgatggctagatgtttagtaggtgcacaggatacttaatggtattggagtcaactggacagtaataatagttcatagcacgataaataactgccttttccaaattatccgatgttgtaaacaactatgcacataatggttcagtcattagtaattcaataaaaacctcaacataggcataaaattcaactttgtaacaatgcaaagcttgtaaaagggaaaaagacgaaaagaaaatatttgcagtccaatatagttttcattctacgttggttagcattcatgtcatttaggatctagtgtctgcttgattggagtaagaggctactagtgcaaaggtggagattctggaattaatatcattttaactcttgcttgatataaaaaaggtatgatgttttagaaaacaaaatgtactcagtttcacttttgtgctttcctgcattccaagtactcaatcaggcagactgtatttcaatgaacttagaagtaaattgttgcctactctataaactacatctagtttggctttaggagaaataaggtattgataatttggttgtacaatgacataacttaaatttaattagtacaggtgaagaagataagaatgttgagataaaaatgaggacgtttggcccagaacatcaaaataaggcagtgtttttagtggtgaatgcttgctccagcaaggattttacaaataatgtagttggagtgtgctttgttggtcaggatgttactggtcaaaaaattgtaatggacaaattcatcaacatacaaggtgactacaaggctattgtacatagcccaaatcctttgatccctcccatttttgcatcggacgataacacatgttgcttagagtggaacactgcaatggaaaagcttactggttggggccgtgtggatgtcattggaaaaatgttggtgggagaggtttttggtagttgctgtcagttgaagggttcagattcaataacaaagttcatgattgtcttacacaatgcacttggtggacaagatacagataaattccctttctcatttcttgatcggcacggaaagtatgtacaaactttcctgactgcaaataagagggttaacatggagggtcagatcataggagctttttgctttttgcaaatcatgagtccggaacttcagcaggctcttaaggcacagagacaacaagaaaagaattcctttggtaggatgaaagagttagcttatatttgtcaaggagttaagaatcctttgagtggcatacgctttacaaactctcttttggaggctacaagcttgaccaatgagcaaaagcagtttcttgagactagtgttgcttgtgagaagcaaatgttaaagataatacgcgacgttgatcttgaaagcatcgaggatgggtaagttttctatttaatcctttaacaacttttggttgtcctggaagagtgttaagaattatagaacttggctatataaatccaatatccctctcatgtcacgtgaaagcttgctagttttgaaatgtgatgacttacagaataacaattcaaagttgtatagtattgaaatataatagctaagtttttagaacaaatggtattttgacatgggactagggaccgagttagtcctaaggttcaatgttgctccacagtactgtaactaaaatgtcaatgtaaagttgcctgtaggtccagactttttgatttgtgagcctgatatctatatatatttaaggccttgcaggttttcacgtgtgaggtatgttggaattctaaaagctatctgaaaggtcaatgggtttttttcacttgtgatatgattcatgaaggcatcctattgtgcaaattgagtattgaatttgcacttgtcacccagcgtatttgatggttttatgtgaaattaacttctctagtactgctaaagatataaacctaacatagttatcaagttcattatatagttatttttcccttctgataagatagtcctggtactattagatgctgatgactggttgatgctaaagaacgagaacatgagaattacttaatatctgatattgatggggtgggcaaatatcttaaggcctgattactttgagaaaacatttttttttttgtttcttgtttcacttttaattacagtattttttttttctgttttcaaaggtttgtacaagaagcaatgaaaataatttttaaaaaaactgttttctagttggctttgatcatatctatgttttatcgatatgacatgaaaatttcaattttgctttgatctgataacataccgaagcatctaatagtttgtcaaatgccctgttttttacatgtttgccaatgatgtgtatggatttcacttgtcttgtatggtgctcctaaatagactaagtcagacaaagcacatgtcactcataaaaatatacactaccttctcgctaggatatgcaaatttttggagttggttggtatctgtgaatatcaataatcaattctatctcaatataccctactttgctagtgggttgctattttcatttcatgttttggttcctttgttagtttcctctgtgtgcttacttgctttaatgcctctataaacttactgcattgattatcttttgagtaaggtgtgattcattttttgttttctatttggggttaggtccctggagcttgaaaagggggaattcttgcttggaaatgtcataaatgcagttgttagccaagtaatgttactgttaagagaaagaaatttacagttgattcgtgatattcctgaagaaatcaagacattggcagtttatggtgatcaattgaggattcaacaagtgttgtctgatttcttgttgaatatagtgcgctatgcaccatctccagatggctgggtagagattcatgtacgtccaagaataaaacaaatctcagatgggctcactcttctccatgctgaatttaggtattgtggcaagatcttcaagtaattttcattatttttttcttcaagagtttatggatgataatctaaacctcaaataagtgtttttaagagccccaggtataaatctgtcaaaatatgacaatataacaattaaatattctgaaacttattgaaaaatctaagtttcccatctgaactcacccctcaacagagcgtgcttaatttttaactctctctggaagaccctggagatagatgtgatatttttatccactactgttacgatctcttgccattccatgtaatttcttgaaaagagattacacaaaagaagaaataactgttcttacactacaaaaagaaagaaagaaaaatataaaaattgcaattgctgattattagctaaatgcattctatacatttagcaacttgtagtactaacctgttttctatatattcaatttttacttggctgttattattttcgagtggttaatatttgtttgtgttatattttttcttttatgaagaatggtatgtcctggtgaaggtcttcctcctgaattgattcaagacatgttcaataacagtcggtgggggactcaagaaggtttagggctgagcatgagcaggaagattctaaagctaatgaacggcgaagtgcagtatatcagggaggccgaacggtgctacttctatgttcttcttgaactacctgtgacacggagaagctctaaaaagtgttaaatatgtattctgtagctgtaagattaagtttaaagccctggcattgcccctcatgctgaccgtagatagtttgttgttatagattatgctctcacctaacaaggcaacttaaggggcaagcatttgaacaagctgatttggctagctatctcagtcacatgtaattctaccaaattggactgttgttttgcaccctgacaaaacttgttcggtacagcaagagtggctagttaatatgtggctaaatgtaaccttaaatcttactgataaagatatggcagagtagatgaaatgaagtttcgccaatatgcgcacatgtttatggccaagtggagtctcctgtgaacattttcaagcaaatgcttacatcattagcagctgtagtgaactccaatctatagttggattgaactgcatccatctcctgcactgttgtatgttctgatagtaactgcttataccaaatgcgttcccaagtgggcaaataattgtaaaatcttagtctccaacaagatttgccatctgcaatgttgctttccaactctccaccttttttttttccatcattgcctgtaaatccctacctactctgtaataaaagctggattatttatcccgtattttttttttaatttcgtgaaaactagcttttctttaataaaaaaaatgaaatgcacttatctttctttattgtctttatttttgagactgtgtttctgagatttattttattccgcaacacattagggagcgagtgaatatccttagagaactccaaagctgatgttactggatggtttgatgagcttgaaagcttttgtagtgtttttttcttgtatcttgagttcaccattcaaacatcacaattatgggaattgcttatttttatatatgagatcatgagggtgagtacgaccagatactgtttactaaataacactagttgaacggatcaaataagggattgaggatgttctaattgaaatgaacataatgttgaaagtaaatccacttgaagtgaaacatagttaacaacgacttggttttgggtttttcaacaatcaagagaaaatttttaggatgacagatttgatggttaagtcttctaaggaaactactaattgtgtggttagttaaaataaaaatcattcatccattacataatataaattcaagtacatcaacatcctaattcagtaattagggatttagtgataaattatgacaaaaaatgaaaagagaaaagaaataaaaaaaagagaggaactttattaatgaattgatgaggaaaggtgtacttcaaatgcttta

SEQ ID NO: 345 - DNA, 23411 bp, Glycine max
  source 1..23411: mol_type = genomic DNA
gtttaaattacatagttaattataaatttaatgtatttaattcaatttaaaggttccattacgaaagttttaattaaacacataatttaaatagttggttttaatttaataagtatagttaaatattttaaaatatatatattttttctaatttctatcgtcatacatttttttgattttgtagtctacgtaagttgattctttgttaatttttgttcatttaagcttttttaattatttagatttgtaggttttttattggacaaaaaatatgaacttacgagaatgaaaaataaaaaaataaaatttaaaggaactaaaatttaaaaaacacaaacttaaatgatttaaaatcaacaaaaaacaccaaggaaccaaaatttttaaaaaatacaaacttatacaaattaaaataaaaaaattatagaaccaaaattgaaaattttgaaaagtgcaaactttatggagtaaaaatatatttatttattaataatgttgtgtcactttatcatgtgtcttaatgagcgagaaacaaagatagtataaaattaaattaaatatagattgaagtatttttcagttcttgtaatttaatttttttatttttaattcttaaaatattttagataacgttttcaaccgtaaaaaataatttatttaaagtattataaaaataaaaaataaaataaacataatttataaattctaaaaataaaaaaaataatttataaggataaaaaaattaaatcataaaaatcaaaaagatatttcaaccttaacgttaaatacatatgtaataatacagttagaattacaaataaggtgactgcagtagaatatatgtgtaatgacgatggatgggcatccatgtccatgataaagatggatggacatgaacatacatacatatgtgtaagagtagcatgacgtgacacggggtaggactcaggaggtgagaggaaaatatcattgccacgtattcaatcaatctaggcttctcagagctgctaaagatcttctctttctttctctctcccagttgtgttctcttctctagtttgtttctgcagttttgcctctctctctctctctctcactatctatctatcccaccataaccattaaccaccacctcttaaatatttttccacaaatcaccaaaatttcccatttttttcaccctctgaatcacaatttttttctttctaactaaaatcgcctctacacacaaggattcaggtacatttttttcctgaattttcttaattaataaattgataattaatcaataaaaaatatatatttttaggttttgttgttgctgtttgtgttaatttccgaactggatttgattgtctctttatatggtgaatctgagttgttagatatttgaggggcttgctttttttttttttttttacttattgtaactatatttattatttatttttttaatttgtattagcttttgaatcttagctgacctctttggccttgagagaaattcaatatttctcctacaaattctcattatcactacaaattttcctttgctctgtttggcaggattctgtttcagatttatctgtgttctgatatttcattatttagaaaacaattttgattattttttagcggttttagagagaaaagaagcttaaagataaccaataaatttgaaaagtacatagattgaagctgcataggagggcaactagttgttgtggtaaatatctacaattttctcgagatgcatttggttgacatcttttgaacttgctttctgtcaaaagcaaagcttcttctgatacatgatttggtggatgattaattgttagtgatggattggttactaaggtaaaaaaaaaaaatatctggccatggtgaacagggaatggtgaattatgatattttaattcttgattggtagcatgttttggctggaagttggataactgcttttgattctcagaggcagaaggaaacaataccttgaaagtaaatagatgtcgtcatcttcgtcttcgatggctgcttccagtgaaaggtggattgaccgtcttcagtactcctcattgttctggcctcccccaccagatggtcaacaaagaaaggtgccatttcaatcttgattcctcctcccaatccttttctgtaatgttcttatctcaaaataaactttaacttcagtgcattgaatgtcagttgcattattatttggataataataagaataatgataataataatattgttttgcctaaagtttcaatgtttggagtaaagcttttaaaacttcatcagttaagaaatggaaattctctatggatataataggatctatatgtgatctttctatcctgtgcacttgatgtatatgttaaggggacaaaaatggaaaaattttattgaaaaaggaaagtatttattatactagtaacacaaaaattatttagtgcttgcttttataagtaattgaaagcatttaggagtgtgtttaatgccccttgacctatttggttcttggtgcataggatagaaaaaatcattagccaacatgtttgaggcttgaagatgatgaggtcgagcacatattacatacatatgtttttaaaaagttggaaattttgaagcataaattacatattctgacgtgatacaatcaaaaggacatttttttaggctagttttgttttggaaattgtttcatttgtttttcttgtagtattaccattttgggtgatgggcacctttttctatgctttaaattaatttatgtgtgtatgaatgcagaagtagaggtgcaatattttcattaataattaggatgaaaaactactttatttttcctatgctgattttgaagtttgttaagctcaatatgtggcaccattggctgttgcaatgtccttgtaagagtatataatatataaatttgttgggctacatatttggattctttcatgttgtagaaaatattcatccaaattttttatatcattaaattgattgcatttgaaaaaagtatgggcatggggtgtattcaatctaatgaaattttctggatctttcctgagtattttccaaatttcttttttttcctcttcatatttctgatattttgttgaaaaaattgagtgaaggtatcatagtgttattgtttggactaatgcatgtgcgtgtacataatgttattgtacctttttaattattgattcatttgatccttaattaattattaatttagggtgacattggctatggcaatgatgataaatgaaagaggcagcagattaacaaggttttagagggtctgagtcttgcgcttttggtgcattttgactctgcataagtctgcattttcttctttggtcataaaatgtctgctcaactcatggtgatttttttcaagtatgctcgtccatagcctttgggatggaacctttccatagccacaaattcatatagcaacaaaatgcttagcaactttttacctctccaaaagattagttaaggattttttaacagattgaaaatgaaattgttaaggttgcagtataaaactttcatgtgactttactgaacaacttaagctttacatgatattggaatctttatgaacaactggtctatagtttgatccttgctgctcccattatcctaatgaaaagtttaatttcagcacaatttaggtgggtccatgcattatccaagctttaaacacaaagggcacttgtgtgaggggaatgtattggagatacaatataaaaccattcacgtgcctttacctaagaacttaagttgttgagatagttggttcataactgggatgatatggagggatgcatctttgtactttagccttagcatgaaactagcagctatttgtatttaacacagtctagctgttagatatttgtgattctctggtatttttggtgactgttagatatcttgagaatttggaaaactttcttgtatgtcatttcaaatgttttggggggagtaattattaacggagacaagattctacactggaatccaaagtgtttatggttggacaaaagtgccagaatttttaaggataattttgtttccagttgcattattttatggaattaaatgatctttttgctagctcaactaatctctatttttgagggggtctctttgctgataggctggagagctttgttcactttatgtgcaagtcttttttttttttttgaatttctcttttgaggataccatatcttctattgatgaaaaattctctgaaatgggatgatataatcaattgttttgtaatcttttctcaatgtagtttcagacaagtttcccccataaccatattaagtgggttgttttttcaatattatctcttaaagtttgtatttaatcttacatgtaagaaattggaaactcttcaatcttattgtactggcaagaaagcagcagtcttttggtgatttttttatttttattttatttttaaaacagtctttagtgaatcgtaatgctgtaaataattgcttctcaatctatatgtaaacattttcacgtcttctgctgtatcagaagctcattattgatttattgttccattttgctgttttttctcatattacttatgctttccctaggatcaaattgctgcatatgttgagtacttcattcagtttacatcagaacaatttgctgatgatattgctgaggtatgataaaatgcacccatatttactgacaaatcttgtgaactcgaatagaaatataattatttaacaaattcaattttttttgtattaatttttgcaagagaaggctaagagtttttatcaaatgccactcactgttcaatattattttgacagttgatccgtaaccattatccatccaaggatattcttctctttgatgatgttttgggtatttatgctctatcccatgtcagtttaacttatgattgactcaacataaatatggttaccatgatttatttctattttatttgtaataacttctttatgttttcacatgtaaatctagcgacatttgtccttcatcatccagagcatgggcatgcagttgtgcttccaattatttcatgtattattgatggtacactagtctatgataaggctagtcctccatttgcttctttcatatcttcagtctgcccaaaaattgaggtataattataattccctgcccgatattttgattttattcatatataattcaatttcatagctaaaatgtctcttgctttcttctttcagtttctatactgatttaatatagcaattattcagtttcagtatctacaaaggggttctctattattttcatttcttatgtgtataattttgcagaatgaatactcggaggaatgggctctagcatgtggtgaaattttgcgcattttaactcattacaatcgccctatttacaaaacagaaagacaatctggtgaaaccgaaagaagcactagtggcagtcatgccacaactagtgaacctgggaaatctgggcataattctttgacacagcatgagaagaaacctataaggccgttgtccccctggattactgatattttgttggcttcaccagtaggtattcgaagtgactatttccgatggtgagtatttcttaaaagtaatagataatttagctctatttatttggccagaagtagttaatcatgtatgcatgtatgttttaactttgcttgcaagtcctaagggtgtcgaggttcagtttggttcactttaaggtttgaccccagactcaaccatttttcatggttcataatttcaaaaacaaactaagacatccatcatggtttggttcactttcaaaccatggtttattattgtttcaagtttcgtcagtaccacttgaaataaaaaggaagaactgaatatatttttgtgtgtttctaatacaagctctaatccttttttatagtctaaatggctaatcctattaaaggaaatagggaaattaacataaaaaggaaagtaagacaaatatatatttgcctatcgagataatatcaaagatatttactacactccctctcaagttggtaaatgaatatcaattattcccaacttactagtaagttcatggaatcttgctgtagggagtcccttggtggatacatttgccaattgaagccatgaagggatgtaggctgtggctataagatagttgccaacttttccttgataaagtgcttgtcaatctctatatgcttggttttgtcatgttgtagttgtatgggattgtgggcaatgctaatagccggattatcacaaaacaaccttttagggtcttcatactttatcttgaggtcatcaagaatgaccttcatccataacacttcatagatattatgtgccatagttcgaaactccgcttttgcattagatcgagctactgcattttattttttattcctccatgtcaccagatttcctcccataaacatgtagtactctgaggtggatcttctatcaacaattgaccggcatagtctgcatctatatacacttccatggataatgtacattctcttttgaataacaatccttttcctgtacttgccttcaaatattggaggattttatttaatgccgacaagtgtatcttttggggatcatgcatgaattgacttcctacacttacaacagaagcaatgtttggtctagtttggtataaatagatgagatttcccaccaatctttggtattgagacttctctgttagaaagtcccacatcgcttgtctcaattcttggggtacaacttatatatctgttggacaacttcacttagagtcaattggttttaagttgaaatctaacatggtatcaaagcctatagcccatcttagttcttgcctattctagtaggttcatctaacattctctactgttgatcttttttcctcacttccaatcttgtggttcaatttgaactctagatgtttacaccctaatttgtttgttttttttttttttttaaatatctagtacatgcattctttgggagataaaaataccttgtttggaataggcaacctctatcccaagaaagtgcatgggaaaactgcttcatatcaaactaggttgccaatttttccctcagaacattctttttagtctcattattacatgcaatgaccatgtcatccacatagactaggagtgtgagtttgccatcatgggagtaatgcttaatgaaaaagggtacgatcccgttgacattgtctgtactctagggatatcatatctttggtgaatcttccaaaccatgctcgaggagattgtttgtggccatacagtgtcttcataagcctacacacactttattcttttcattataagaatcaaatcctggtactctcctttattaataacacatataattttgccgataaaaaaaaaaattataagaatcaaatcctagaggaatttccgtatacagttcactttccaggtctccatgaagtaaaacatttttatcattgagttgttgtaggtcccagccaaagtgagcaactagtaaaaggataattctcattgtattcatatttgctattaagggaaacgtctcttcctaatcaatcccatatctctgggccctttgcaactaatctcgtcttataccaatgtagggtgccatcaaatttatatttcagtggctgataaaaaaaaattatatttcagtgtatattcacctgtaaccgtctgccttctaatcttttgacttgtctacaatctataacaggtcaagtaattttttttcttataatgtcgtcatttctttattcatgtcccaaacctagttctcatccgttaaagcttcttgaattaaggtgggagttttgattttgttaaatatatgatatgattagatttattgtaaaaagggaaactgtgaatgtttgttcatacgcgatgcatgcgcccacatgcattgcccttctccgacatgtcagattcatgcgctttcacctaataggtgggcaacaccctcttctaacgaccctcccttgtgctgtttggcttctgttttcatggcttctgatggttccgtttccaattcagcctttgccatgacttttaccaccgttctgctgatctcatgcgagaaactgatcgggacagcaaactacagtacttgggttgccctgtctaactgtgggtccatgtttggtagattcaattgccttcctttcaccaggccagacatcacctttgcagtaagtgtggtaagtcaattccttaatgccccttgtaatagccattgggatgctatcatgcacattcttagatacatcaagaatgcaccaggttgtggactcctatatgaagatgaaggcaatgccaagattgttggttactgtcttgttgattggacaggatcaccatcagacaggaggtctacctctggttattttgtacttcttggggggaagttgatctcatggagaagcaaaatacagttttgctaaatccagcaccaaagctgaatattgtgccatgacaacatctgcatgtgaaatcacatttatatgtgcgttatcttgtagttattagttgatagaaatcagtgattgtatttcctaataatcaacaattgattaactgtgtaatcaattactgattcttggttgagatttcacgactatcgtgtctcaccggggactcactgtcctcggtgggccctccgctcgctgtctctttcaagtgacctgtttaaggttttctggtgactgtcggcggctgctgctggtgctccaacgacctttctggccaaacaacccacgtatctgaaccaccttctgccgatctaccccgcgccattgacagcgtcttgaaagaaccaccgacacactctcatgcacttccttttgctgtgccaaacagcagtcaaacaacccctgttcccagcgcatagcagggaatccggccatcgttttcagtgccaggcttgccagattgaggtgcacaaagcctagtcctcttcgggatgttttgtaattgttgcctcgacctttcctttttttctttccacctctggacatgttgttcttcacgggtgcacagtacttgccaccactattgtgaactccagcctctgctgcttttcttattattcacgggtgaacaatacccattgccacgacgggccttcgctggctgctgccgagccatgtttatccagtgcaaccacatgattggaaccatcttctgtttctattgggtttaccatatttgtaacaagcttggttcatgtcacatatatgctccagcttgagggggagtgttagattacatttcatttgtacgttatcttgtacacatgatcgaaatcagtgattgtattccctaataatcagtaattaatcgatcatgtaatcattactgattctgtttctctattataaataaggatcaggtgtggtaatctaagacacaattacactaaacacttttataatccacaacacctcataaattttttgagccattgctcaaaactctttgtttgcactcaaccttgtaatctcatttagctttttactccttcaagcaatcaagtttccacccaagaacacgcgatatcttgaggcagatcttctatcaacaatcaaccactatataagtctgcatatacttccttggataacttttcgctcatattgaagagaaattctcttcctggacttgccttcaaatactaaataatctaatttgtagatgtctttcacatagaccgtgcatgaacagttgcctgatcataattattgcaaaaacaatatctggtctagtgtgggctagataaataagttttccctatcagtctttgatatcaagcctatttgagctctcccattcctatccaatgattttgcttgatgagctctccatatgttttacgacccaatttgcttgtctctctaagaagatcaatggcatattttctttgagagataaagatgccttttttggagcaggcaacttctattttcaggatttttttcagctttcctagttgcttcatttcaaattgagttgtcaacctttcccttaggatttgttttcaacttcatcatttcctgcaacaaacatatcatctacttagaccaaaaggattgccaatttacctgtctgaaaatgctttatagagtgtggtcaccttgactctacttataccccaaagagagcatagcttgggtaaacatcccaaaccaagcatgcaaagactatttaagcccatatttcctccataatccattagtgaagtcatacattggtggaatctccatatacacctcctataggtctccatgtagaaatgcattttttacttcaaactgttgtaagtctcatccaagtgagctaccaatgagagaataatccttcctgatattcatctttgctaccagagcaaaggtcttctcatagtttgttttgtacatccatctgtatcattgtccttttgtcactcagtttatcaactatctcccaagtcttatttctctccattgctttcatctcttcattcatggttcagacccaattttcatcctcaaggcatcttggactgttttggaaattctgatagaatcaatagctgaaacagaactctaaagttgtgcagaaatatgttcaatacacaacaatttgagatataggatactaagcctggcgaacactgtaatgccaatgccaccacccacaccgctcgtttgtagttgaggaacatggcggaaggttctgacactaattgaccagaaccttttggagaatcacaccacaaaaattagctgttgtagttggagagcccaaggccttataaacctcacactagaatcccatactttcaatgtaggactccaagtctcataacttgcaattggatcctaacaatgtccttatatatcactacaagcacacacaatgcagccatgactcaccaatataattggttacccaataacttactacttcagctgagtcgataactggtccgggttttataacactgctttagtttatataattcagttggaatatgtgtagtttaaactttaaacacatggatttcatatgtctctcgtttctctcatctgtcaatagttacataccactcttaagtctaaaaagatcaagtaggtgccagttgagctacaagcttgttggcagcttttcctgattgtttaatgaaatatatggattgaactaaataatcatctttcaaaacagtgttataggaagcatctgaattcatgttcattagggttacctttgttggtataccacataactaagttcaggaatacataatttcatatttttctcagtagtgtaaattagaacaactagtatggtttatagtctctcttcctttatcttgattaaagaaacagcttacttgattttactctcccgtttatcatagtataatgttttaaattatcttgttatgccttgagcgctgagtatatttttgcttaagtcgatgatttgctgtatgttaacaggtgcagtggtattatggggaaatatgctgcaggagaactcaagcctccatcaaccggtacattaaattatgataacttaatacagaacgctgctctttatttttttaaattgatgtttgaccacaatattttgttaacagttatatcaaaatatttgggacatttcttcagaaagtagagagttttgttaagttgtatgttcacatgagcttgagtttatgtttacaccatatgttacttaacacaagttttctgtgacataacatcctcaatgcactgggaggagactaggaattaattttgttctttttcattgaacagctatattcatcaatgaattttattaaacaagaatatcattttttactatcatattgacactaatgtttatgttcgaaatatgataaggaaatgacttttttttttttttttttaccttagcttcttcccgtggttctgggaagcatcctcaacttgtgccttcaactccaagatgggctgttgccaatggtgctggtgttatattaagtgtttgtgatgatgaagttgctcgcaatgagactgctactttaacagcagctgctgtccctgcgcttttgcttcctcctccaacgacagctctggatgagcatcttgttgctggattaccagctctggaaccatatgctcgtttatttcataggttattttgaacttaataccttatcttgttttttagttgttcatagagttcatctgcctgagaaaatatatatacacctaacctttgcagatattatgcaattgctactccaagtgctacacaaagacttcttcttggacttctagaagcacccccatcatgggctccagatgcacttgacgctgctgtgcagcttgtggagcttcttcgagctgctgaagattatgcatctggcataagggtaagcataatgtgcctttcctgccttttcattattatggttttcatatgaataaaaattgatagattcactttaacgtcttcaataaaaaaatgaaaagtgaatatatatatatatatatatattataaagttctcgtaacgtttatctttcgttcggtgaaaaaaacgtatatctttcatattcatattttcatatgtaactgcaacatattattaaaataagtaaaaaaataattttaaaaatttgtttcacaagttaaaaatggccgataaaaagttataatttttttacaaatacaaaaaaactacgtaaattttcttctaaaagccatcctgaaaatgaatatttcagtcttttgccaaaagttgctaagattttcttaaaaatattttgactcataaatttttcatctttgtattaaaagataaaaaatataaactaatttgtttttttattcaattatgaatttcgtaaaaattaattctattggtgtagaattttaaaatttgactactctaaagtaaattaataatcaactttagaaggtaaagtaaataattccagtcattaataaaaagattaattgttgatattacatgcacatgcataaaaaatatatattaatgcatcaaaatattatttgtcgattttcttatcaacaactaaaaatactcattttattattgctaattttagaggagtcaaaaattgaagactttatttttaattgttcaccgatagcaaaattgcagattactatgaatttttaaggagaaggaatagttagttaatatagttagactactaatgagttagttagttagttagttagttagaggggtttattagatataaatagaggaaaaatgataggagagaggggaatcttatcatttgtagattagctctttgtgaaaggagaaatcctttgtgaagggaaaacccttggaggagagttttctctcctattttctgttcttttcttactagttaataaattcatttattttcttcctcattgcaattcttggttcctaacaaaattggtccgacctgccggatcttcgaggggaagctagtgatagagatggaggaagcgcaaatttggactaagaaggtgaaactgccagcattcatggggacaaacccaattggttggattgctagggctggaaaattctgaggtacaagaaattccttcattccataagctgcaatatgcattcatgagcatggagggtgctgcgacacattggttctacatttggagccaaaacaacccagattcaaattgggagtcattttccacagctttgatcaaaagattcagagatcaccatggtaaccacatctttgaaagattgagtatcttgaagcaagaaaagccaactgagacaaaaacccatatcaaaaaatgggagacttccacagagttcttggaagggaggatcaacatttcagagcggaaacacatgttgtgcaagatattgaatgaagaagttgattcccatgcctcccaacaagacaaaaatagcatggagggaagtgggtcagaattcagtgaagcaaaggctagttcttgggcaagaaaggtggaactacccagctttgatagaagcatagaagggggaactgatttgaagggggtagcagttttgagtgtgacaatgacccattgcagttcttgaaatcagaaaacagaagtaaagaaggttcagtaatcaagaaccacaccctttgtggtggagaagaaacaaaaaatgatgaagcaaagttagcaagagaaaaaaagattgaaaaggttatggaggaagaagttgatccatcgataaagagggagaagcacaagaaaagcggagtgacgaatgtgggctgcaaagacgattttcttgataacccaattacagatttgatcaagaaggaagtcgaagctggtgattcaaccaagccacattgttttcaagattcagatttccataaaaagattgttatggtgaaacaaaaatcattcatgaaggtggttggaacaacaatggtgctggaatcttggaatgtcaacttgttgggtgagcctttagcattaaattttgttgcatctatggctgacagcttagccatggagttaaggcaaaaggaatgtaatgagccagtcaagctgattaaagttatatggagtcgacccttgtccctcccaccactgaagctactagacctcagtttgcatgcaggggtagtgggttgttcctaattgagctacaaggggtgcagttgtcttccagcaatcagacaaaactttaggaagtttcagtgtgaaattccagttttcagattccaaccttgaggacaagattgatttttaggaggggtgtattgttaggatatatggagaaggaagagttagttaatatagttagactactagtgagttagttagttagttagagggacttattagatataaatagaggaagaaggataggagagagggggatcttatcatttgtagattgagcattagctctttgtgaaggaaaaatccttggaggagagttttctctcctattttctgttcttttcttactagtcaataaaatcttttattttcttgctcatttcaattcttggttcctaacaatttctctgttatgaaattaaattagacatcgtcaattagtgaaaaatgttgtggaaatcattcaaaacccaaatttatattcaagagttaacattgtgcttgactcaggttgtgcattcgttcatttacattgttgaatatttggttttcctctagattttctttcacctttttatttcttaatagttgatgaatctactagttttcctgaatttttcactttgaattaagaaaatgttagtgaaaatattttaaaaataatgtttggctaaacagatttttataacctcatgaattataatgggaagtcttatgtataaaactcaagattatttgttttggttttgttttatatacttataataatatttagatgtaacagtatgagcaactgtgactaaagttgaggcttgtgatgcctttgtattgtatgaactccttgtaccccacataagataattgagacactgttttggtagaatgaagataattgatctctaatttacaggccaaaagctatagagctccatgtagcttgtgcaacaagctagacacttagtacataattaactaacttctaacagaaataacagctgctgcggaggctaactaaaatgtctagctgacacttgatatactgtgctaactttttggacactagctgactaatcagaaaagtgttagaggctaaaaatagaaaagtacggtagtgatggtcctattaaatatatgagaaggattacaaaactacaaaagttttcccctagtaatcccagagctcaactccttcagagagtgcaaagcacctctacgctgtgtacagccaaaagagagataacagaatgctcgacctgccttcctaccttgccactacctacctatattctcctcccaacgtgataggttctctctccccataaccaactatgagtctaggatagattcccttcctgccctgtctagaatatacttgccaaaacttatgcccatgatcgggctgaacctgtccatgctcagccatatcaactgggtccttagctttcatgactctaacaaaaagcactagactttgtacctcttaggagttataccacttttataaccacttgagaacatttgagggaattctattttgcaacttcagaacaagtgcaacataaaataacaattatgtatgtgtatttcagtgggattactagctactggacgacatactattgtgcattttggtatttcatctgaagaaactttgtgaaagatttaaaaccatacaataactgactgatgtgtttgaaagatttaaaaccatacaataactgactgatgtgtttttcttttttgttatatgttattgcagcttcctagaaattggatgcatttgcatttcttgcgtgcaatagggactgcaatgtccatgagagctggtatagccgctgatgctgcagctgctcttctttttcgtatactttcccagcctgcattgctttttcctcctcttagacaagttgacggagttgaagttcaacatgaacctttgggtggttatatttcttcctataaaaagcaggttgtgttcacctttatcagttaacatttttattttctttatgttattcttaatttgtacagtcactcatgtagattctttccgtacacttgagatctaaaacatttgttgttgatcagatagaagttcctgcagctgaagcctctattgaagctactgcccaaggcattgcatcaatgctttgtgcccatggtccagaggttgaatggagaatttgcaccatttgggaagctgcttatggcctgattcctacaagttcctcagctgttgatcttccggaaattatagttgcaaccccactacagcctcccgtgctgtcatggaatttgtacatacccctattgaaggtcctggaatatcttcctcgtggaagcccatcagaggcatgtcttatgaaaatatttgctgctacagtggaagctattcttcagaggacatttccacctgagtccactagagaacaaaacagaaaatcaaaatacctagctggcataggctttggctctgcctcaaaaaacctggccgtggcagaacttcgtacaatggttcattcactcttcttagaatcatgtgcatctgtagagcttgcttcacgcctactttttgttgtcttaactgtctgcgtcagtcatgaagctcaattcagtggaagcaagaggccaagaggtgaagataactattcatctgaggatatcattgaggacttacaaacatctgaaaaccagaaagaatcaaaaaataggaaattgaagaagcaaggtcctgttgcagcatttgattcttatgttctggctgccgtttgtgcccttgcctgtgagcttcagttgttccctttgatttcacgggggaataatcatttagcttccaataaggtgcaagatatagccaagcctgttagactaaatggatcctcccatgagttgcggaatggcttagattcagcagtacgtcatactcacagaattttagcaattttagaggcactattttcattgaagccatcttctgttggaaccccttggagttacagctcaaatgagatagttgcagctgctatggttgctgcccatgtttctgaactatttagaaggtcaaaagcttgcatgcatgctctgtctgttctgattcgttgcaaatgggacaatgaaattcactccagggcatcatcattgtataatctcatagatattcacagcaaagctgttgcatctatagtgaacaaggcagagccattagaagcaaccttaattcatgcacctattcggaaggattcccttgtttgtgttggtgttaaaaggcagaatcagtgtgaaagtagtagctgttttgatgctgggcggacatctgttgtaccttcagaagattcattcccatcaaaacttgaccataattctaacaaaaccccatgtccaaagggtgcatcagattataccttgggtaaaggtgtcacaggtttctcattggatgcgtctgatctagccaacttcctcacaatggacaggcatataggattgaattgcaatggacaaatttttctaagatccacgctagcagagaaacaagaattatgtttttctgtagtttcactgctatggcacaagctgattgcatctcctgaaacacaaccttgtgcagaaagcacttctgcccaacagggctggagacaggtacaagcacaaatgttatattgcagcaactttatcatcttttttttttcaatggttgaatatatatgtttttaacctataatgcaacttaagaaaattcccttgtgatacagcttagttcttgttaatcatagaagttaggttctgaaaagcaagaactgcagatgaggataaataggtgtatcctgcgtgcacaagaaacataggaaagacagccaaaattctgaaactgcatcatatgaataaaattgtatggtctgaaattttaaaaagcagagaaagcaacatcccttactatgagcattaaaaattatttattttgaaaataactaaatagctgctctcatcaaaggcagattattataaaatctacattaaactgaagaagcatcatgccaagacaagatatattgggtgtacttgtaacttacgaatgtaaaatgaaataatgataggtattgaagaattcatattttagttggtttgtttaattggtaaagattgactaagagttaccctattgagacacataataagatatagttacacaatgtgattgtgtggatccaaatatctcttttatgtccctatttcaagtgaaaaggttaattactgtctattttggatttaatgttatgtaggttgttgatgcattatgcaacgttgtatcagcctcaccaacaaaagcagctacagcagttgtacttcaggtccaaaattcgtcttatcatgaatggtttcataaaattacattcggaactaacattgaactcctattctgtttagcaaggatactttccttcttttacccaaaaaaatatatcatttcttaaacagacttccaaaatttatgaattatcatttttaatacctctgagaattggcttttactgtctagaaagttcaatagccgatgctgaaaatctcatctatccaatgtttatctgttgtatatttttttattaaatattattatttcccacatttcacatgtttagtcactttcctgggcttgtttacttgtcaggcggagcgggaattgcagccctggattgccaaggatgatgattcaggtcagaagatgtggagaatcaatcagcggattgtaaaattgattgtggaacttatgaggaatcatgagactgcagaatcattggtaattgtggcaagttcatcagatttactactgcgagccacagatgggatgctggttgatggagaagcttgcactttaccacagctggaggtagtatatttcaacaagtgtattgttatattgtgtgtgatttctatgttccgtattatatttaattagtttatcaattggtgttcaataatctctgcgtgtgtggttaatcatgtcttttctgagtccactcacgtttcacatatttcggaaacctaaaatgaggtcctagatgaggtatattgtgatcatgatcattgtgaggtagaaggtttaatagatgtaactatgctggtcctgtagaacagagaggaccttgggattgtaaacttgtcatggaaacctggtttcttggaagagtaagaagcaaaatgtagtggcatagtcaagtgtagaattagattatcatgctatggctaagaatacttgcgaacttgtgtgggcatcacttgttggaatcaacttcagaagtactaagcatacacaagttagagtgatagcctggctgttcatattgtgtttagttctatttttaatgagctgattaaacacaatgaagaagattgtcactgagaaacttcagcattggctcatttctacaagttatgcaaggaatgaggtgtaaaagctaaataatattaaatgttgttaaaggaggatagattacattgtagcaagctgcacgtgattaagaccttaaatctacttaagaggcggagtgttaagacataatcaatgttttaaatgttttaaaagcaagacccatcaataaaaaattgaagacactgagccaaagttcattggctaaaccatagttgaaaccatggtcaaatcaacaatattataattttaatattatatattaagtaataaattaacataaaaatacatgggtaaatttttaaaaaagcataaagggccatgatacaggcccaacaagataaaaaaatcaatagtagaagcttaataatagaacatatgtagacctttatgtgaagacctttattaatctcaaaatataattttgaacaaataaaaaaaaattgaaaagtgaaaagaaaattaaaagaaaaactcttttcaaaattatctttttcccaattttcattgattttagactggtttgaccagtttttcactgatcttttgctctcctgattttttagtttttttgaagtgagttaactgattcactggttttccaatcaaacctgctgatccagtccaattttctattttatggatataacaatgttttactgtgttttgcattaatgtccagggtttgcccattatatagtggtattccaatttatttatttttttgaaaaggcaatacatcatgattttctaatttctaccactaacaaacttgatattttgagcagctttagtgggactgtgaagggaggatttggtgtttcatatattttgttttatagttaagctttactgatattcatgtttcaataatttataatggccagctattggaagcaacagctagagcagttcagccagtgctcgagtttggagaatctggattggctgtggcagatggcctttcaaaccttttaaaggtgaacaaacttccttattggaacttgtaatttatctgggctatggtgaatgaaatatgcaggttaaacattgttaatctaattctagatttcaagacaagtgaatatttgtgagctaaaacaaccttttgatctcatcttattttttagtttcagtttagttccctaaggtgttttggtccttaaagtgtttttattaggccaaatcggtccttctgtcagtttatcacactaacattgttaactttggctgacatgggcaaatgtccatctaatgtggcatctcgtacagtttgccacatattactaagttgactaagttagtatagtaaactaaccgaaggcccaacttggtctaatagagatgctttaggggaccaaagtggaactttttaaatttgtgataccaaaatgaaactaaaaaataaaatggaccaaaagggtattttagcccatgtaagtaaaagggcaatcaagtgcaaaactaaagcaattcatgtgctattttttttcttttgtttctatacttttatacaattattgactgatatgcttgagttgtgaatataccacatgcagtgtcgcctctcagctacaattagatgtctttctcatccaagtgcacatgtccgagctctgagtatatcagttcttcgtgacattttgcatactggttcaatcagatgtagtcctaaacctcggagattaaatggcacccacaacccttcttatcaatacttcaatttggatgccgttgactggcaagctgacatagaaaaatgcttgacttgggaagctcacagccgactttcaaacggattgtctattaactttcttgatatcgctgccaaagagttaggctgtactatttccatgtgaaatgaaatcatccatcttagtctgtgacaattttttgctagacttatagaaaaagaaaaagaaaacagaagttattgatatgcttatggaactaacgggtttgcaaataagcataattctgctagtcctgttaaaaagagctgcaatcataattctagtatgtttatagaaagctcattttgtatcatgcatgtactctagctaaactaagtttcaccttgaacttgcttgtgactctgctctggatagaacagacttgtacagtaacgaaaaacgactgtaaccaggtccttttctccatcattgtctcattttgtgttatgcttatgttgatttagcttgtatggaagtcagttccaattgtttggattaatgtatgttcaggcaggatttccttttttctctcttttaattttgtgagattgttgttggttttcatctttttgctagagatttgtgttttttctttattattttcaaagtgagtaaaatatgtttttttcccttgtttaatcttgatttctgtttttagtccccttaaaaggttactatttttagttccttataaattgtttcgctttgtttttagtctctgacattaattttagttgttaagttatgatgataaagataaattgcatgtgaaatttttttactgttcatatgtggaggttttatgtttaagtttttggtgggttttaagtttaaaccgatgcaaattttctgttagtctaaatgtttatttttgtaacatttatggaggttttaaaaagaatggtgtttggggttttgattttttttcttttttgcaacatttttggcggtatagagtctgcgaaagatttccagcagataaaaattgctagaaacttacagaaaatttctaaacgcaaattttgtctgtcacacaattaatgccgaggattaaaaataaaatgggataatttatgaggaactaaaaatagaaatcaagattaaaggagggatgaaaccatattttacctttttgaagtttatacaaatttattaaggctgtcttggataaaattaattgaaattttagcttaagtctttgataaaaataactgttgaaatagttaaaaaatatagaatgataataaaataataaaataatgttttattttaaaaagataataaggaaaataaataaatatataaatgataaaagtaaaagaaaatatataaaacaaaattaaaagttaatatcataaaaaatgttactttgagtaacgcacgttaaaaactaatgagaagttattaaaataattaatttaatgaacaatgaactttttagtaagtaaaaaaaatttaaaattagctaaaatatcttgtgttgttaaatataacctaaagtgaatattgtagtgcatttaaaaaattaaaaaagaagg

SEQ ID NO: 346 - DNA, 4890 bp, Glycine max
  source 1..4890: mol_type = genomic DNA
ctatgggacaaaataaaaatacgccgtgtaattttttatcttaaataaggatatatatttgtgttaaggtgtattagtgttaaggtgtaagtgacctggattgaaaactattttttaacttaattttattaaacttaattgggttagattggattgagtttatctttttttttttgtcagcccaatccaatctaactttaattggattggatttgattaattatcaggttaagtcattaaaaaattgtcaccttaagtcttaaaaaaaattatcaagctaaaaaaataataagatattttatttgacagaaaaagaggaaatattattcatatgataaacaataatcactaatagaattcgataattataaaatataaaattaatttataactccaactacttaagtcaataataatcataaatataacattgtcttacaactcaaaggacttgagtcactaataatcattaatcatcaaaatataaaagtcttaaactacataatatctcacagcaatgtaagtgtgtagcgcttagtgcttactagggttttttaatatatagtaacttgcagaggtcgattggttttagttggatccaaacctcccaaccagtcatctaattcaattataattggtttcattagattaaaatcaaatcaatccaatgatccaatcaaatccaccaaaatctaatttgattggacgggtttacagattggatgtaatctaattatctaatcaactcacaaaaatctaattggactagattgaaggagtttatggattgagtgttatgaattaatttggatcaaaatatatattgtattatccattaaaatgttcacttagcaacttattattgtaatttgacaagattgaaaaattgtggcatgaattattataaattatattgtattttatttgcatgaataaaaaaaattgcattttttttctaaaaaaacacttaatattggactttggttatgaaacgggtcatggggctccgtgaatatatattcaaatagaaccctcctagggttttagttttgggtctctctcattcttcacccgctcagacgcagaggagcagaagcctaagcctcaaacatggttagctcttcgtcttgaaactaattgcattcaacttatcattttgcttttactttttttttccttgttttcgtttttatcattaaatggaaatgaaagggtgaaataaattgaatttatactttagcataccattccttaagcaaaagtttttgtcttcggttctgtcgttaatcgttagaattatggtatgtagtctattgatgtggttgggttgctttctgagttgttctctgcttgaacaattcacttattttgttttttattgatgaaaattgagtccttagctgaagctacatcccctcagttatataattggctttgatgtgttgaaattcttatagcatgacatgttgatttttttttttatgattgtgtttttttttatttttggtgggatgcaccttgacaagttttgtgatgtttttttttttaattattttttgggattttatttccgtcaatgcttgttttattgtcgaactggtgtaaatactatcaggttttaaagaacgattcttgactgtgattgtgcccacaatgtcaaggttgttgggatctcttgtggtcacattagttgtatttgtttgcaattttccacaacacactttaatactgttggaatataagtttaagttgaagtcccgcatcagataggaatgagaagaggaatgaaaaggtggaacactgtataagtgaggataagacccataaacttgagctttaatgttttgaatcaaagtgtggtgtcaagttcacttatgtggttgctcgagactcattggtttaagagacccattggtttaaatctcttcggtgttgacaccccctctgatgctcaacaaataccttgagtactatttacagtttaatactcaactgtggttgaactggtctgtgtgtaaatttaggggttgcgttcggctgttgcgttgtcaatctctagcttttttcggatttaatggtttatatgacctgaccactgacttggttggctaacggttcgattaatggttgaatttgtcagactgtccggttcagtctagtttttaaaacacgggcctacaatgattcattgcttggtgtaattgttaggaatattgagtatcttaagttctgacctcaaattctaatttgtagtttttctcctgtatttcaggcgagagggttaaagaaacacctgaagaggctcaatgctccaaaacattggatgcttgacaagcttggtggtgcctttgtatgtacagtactcacaattgtcgatgatattattttactcaaatttatttgtaattttcatttgaactcatgtactcatttggcctggctctgtaggcacccaagccatcatctggaccccacaagtcccgggagtgtcttcctctgatcctcatcctacgaaacaggctaaagtatgctctaacatatagagaagttattgccatcttgatgcagcgccatgttcttgttgatggcaaggttaggacagacaagacataccctgctggtttcatgggtatgtacattttaaaacttggttgccatatagtgctgttatgtccaaattattgtttatttggatatttggactatattgtcacttttgtatattcatatcaagatttttaaattgggattttgacaattttgaccagatgttgtttctattcccaaaacaaatgaaaatttccgtctactgtatgacacaaaaggtcgattccgtctccactctgtaagggatgaagagtcaaaggtttgtctattcttgcataatctctctaatgtctgttcatacaaatttgtgccacatattggttttgcatgtagtaaattttttgtttcaataatgtattttgcatcaaaatttctcaatggcatattatcactcactgttgaaggtgtgtcgttggatggtcaaatactaaaatttaggactataaattggaaacttgtttggacatatcttagattggtgctacttgatgcttttgagctctataaatttgttttgctggatcttattttaatgtttttctgtagattttctttctagtgattttactctaatttttgccttgttatagtttaagctctgcaaggttcgatctgttcaatttgggcaaaagggtatcccctatttaaacacatacgatgggcgcaccatccgctatcctgacccactaatcaaggccaatgacaccatcaagctggaccttgaaagcaacaagatcactgatttcatcaaatttgatgtggggaatgttgttatggtcactggtggaaggaacagaggccgtgtcggtgtcatcaagaacagagagaaacacaagggaagttttgagaccatccatgtccaggatgcaactggtcacgaatttgcaactcgtatgggtaatgtcttcatcattggcaaagggacaaaaccttgggtgtctcttcccaaaggcaagggtatcaagttgtctatcattgaggaggctagaaagaggcttgctgcacaaaatgaaacagttgcctaaatgattttgctggtaaaatttagctattttatctcttcggctgtctgagcataggatttttggtgaaatgactgagcatagttttgtatcaaactttatattacaattttgagctgttgatttcagtttttattaccttgtgattattaatattttggtgagatattgatctttttaggggggtaaaattacgtccttaatcttttactttagttgcaattttacctcctcagatattaaattcagtatattttctcatttatattcctacctaatatggaattttctttattcatcactccaactttatatcgaacccgaatgaatatttgtataacaggtgtgaattaagttaaaaaattgttgatctatcttaatgctagctttagtttatttgggctttttcattggtctgtattatttatttatatataattacaatcgagaaatgtaaacttaaaacactatttaattaaattatataactacaaagttaaatccaaagatttacaatctattatcttttaaaataaatcatttttattttcgaatatcattatgataaacttgaaaaggagaaattcattagttatagtaattaattatgtaacatgtcaatagcttttttgataactttttttgccccaactctgatgtttgttaactggatatgtccacattacaatacctattaaataataatcattttaattcttaaaattatatcaataaaaattaaaattactggtggttaggaattttaggaactaaaatgtcgtttttataatttcgtaagctaatttagagtattactccattgagtaggttaagattttaatgatgtggcgaaataaaatatcgtgtaattgtgtcagaaattatctaaatatttttatttaagagaataatttgcttctaagcaaatgttacataaattaaaaaaaaaggtctttttatataaattaaaacaaacaaaaaaagtaatttggattatgttgtaaaaatttactctaccattattattatcattatcattaatcaattattattattgtcaccaccaacttatgacatctttattattgtcttcatcacaattatcattatcacaattactaccattatcttcactatcattattgtagctatcttgactatcacttctactagctaaagtcacaattataaaattaacaatcatcattattattgtcatgatcaatactactatcatgtaggcatggcaacggggcggggc

SEQ ID NO: 347 - DNA, 4779 bp, Glycine max; identical to SEQ ID NO: 292
  source 1..4779: mol_type = genomic DNA

SEQ ID NO: 348 - DNA, 7370 bp, Glycine max
  source 1..7370: mol_type = genomic DNA
gtaattaggcattttaggaatggagaaagcgattgcgcgtgaacttgttcaacattttgccattggtgtggacgagatttatctctatagacgagtattttttgtgtgtcatattgcgtaaggaatacaaatattatttttgatttattaaataacaaatgttatgctttattatgtgtttcatatttttatattattttgtttcataattaatagtaagggacactcaatatataataccaaatcacctttagtttttgcatagaaaaatatataggaacatcacttcatacaaaaaattcttttatacacacacacactcactctctctctctctataaagttttaatttttataaacatcttcttacgattattgaaacaacagcttaaaataataaaaataaatatattgaaagtttcaatttataaatcagcagtaaaagtttttacaatatggataataaaaattatgataaatatatattttaaaatagagaaaaagaccatgtcctgaaagtataaacttaaaagtttatgaattactataaaattattttaaaagttatgaaaaaataaattgatacgtaattgagtcaaaaatgaaaaaatattttatactggtgcattatcagtgaaccctttaccataaatatctaaaaaatataataaaattattttacattggttatgcattatcattaaactattttgcacgattatggattacatatcataattcattttttataaactgtttgtgattagtaagagaagaatttaaaattattcttaagaataattccaattcaatatagaaaagcacacacttgacaatactacaaaagaagtagtaatatctgctcaaaagaaaactagctggttcaattttgcgggacattaattaataaaagacctctctcattatttattattttttgtttacattcattttcattaccaattgataaataaatgaaagtataaaagaatgctagctaggatgaggaaatgaagaagagaagaactgaataatatgagaagacactcacaacattgatttagaaacatttaagaagaagaagtgaaaggtggtgtgtgtggggtgctactcctcctcctcctcctcctaccctttcattttcatttcccacatttctctctctctctctcctatacttcctctttacactccccatctctctcacttttcattttcatctccattttttttctctaaaactccaatttcccattttacccctcactgtcgatccccccttcgccctcgctccgattcctaggttagtctcctgaaacgcaccgttttgaggccttcgccgttgattcgcactctccgacgtgttgaaattaattaatttgctctctctttctctttcgattttaggaacagggttttcagttttcactgttccattaagtttccgagctcaattcagcttccgattcgccgcgcgcaaaacgacttcgtttttggattttggcgtcgcgtcctattcaggtaactatcgtcttgtttctagcgttcgttcttgttctccatttcttgttttttgttcagtggaaaatctcgatctgttgaatttatatattattaaaattaaaatcagaatcataaaaaaggtcataatcaaggttttggattacgatcacaattcatcacatttttttactaatattttatgaaattactgacacgtactgtcacaattgtgttcacagaaagaaacccaatcatttattaaaacctcgagcttaaaaattaataatagtattaaatgcattttttctttaattttgtttttgtctttgctctggttgttaatattgtaacaaatggccagaatcgcagtcccttttttaaaacctttaggattaataaatacctaaactattaaatgcactttctctttgctcaggttattaatattgtaataaatggccagaataaacctcgggattaataaataacaaaagtattaaatgcatttattctttgattttgtttttctatttgcttgggttattaatattgtaatgaatgtgtactgtgctgtggtgaccggatttggggtgttgggttggtgggaacaattaattccgtgttatgtgtgtgtgcttggcctttgtgggttttaagggatgggattttttttgaaatttttcgtgtgaaatgatatcatgtgataattggtactagtactaaccttttttccccctatatatttgattcctgattgggtattatgggtaaacatgattagtttcgtacttaaatggattttgatgggctgtttctttttttgggtctggaaaatttgtgctttcatggtccagaggagagagcatcattaaatactcggagtcagattttgctgaagtagaaactgggtattcatgcctttactgtgatttacttaatataatatggtgcttcagattattttcttttcaatttaagcactgtagtagtatttttttactagcttttaaagtgtcttcataaaagttcatttcttgttttctctattttttttgtttgaatcatttaatatgattctgctctttttatcttgatgtggtttgcagctccttaccctgtacaaaagaaatatctgaaaaatgaaattaagtggctatgaaactgaaagcaaatttaggagttttcttggttttttctttttactagcttttttcacttttgtaaattttaaggctttcctttgtggttgtgaattatttggacagaagctatatactataagatgagatgaatgaagaaagatattgaagatgaggtgcttcccaatgatatgagtggggcacagttgaatgatgagagttatgaaggaagtgctggcattgttctgaagaaggggccatggacatcaactgaagatgatattttggtggattatgtcaagaagcatggggaggggaactggaatgctgttcagaagcacaccgggctgtttcgttgcggaaaaagttgtcggctgcggtgggccaatcacctaaggccaaatttaaagaaaggggcgtttgccgcagaagaggagcggctgattgctgaacttcatgccaaaatgggaaacaaatgggcacgcatggcagctcatgtaagcatattgtatataatttccatttgccatacgtatgtggttataactatagttttttttaaatgttttcttgaaatcattgaattctgtttgctattagtgatgtcactgctgttatgtctttcttgtattgtatcaaggaacttccatctgataaccctattttccttttgacttgtccctaaaaatatggaacttgctagttgtatctcttgatgtcatacaatgacaaacacgcacatagacaaagaaaacagttgattaaatagtcagcgtttggagaggcatctccaaataggtgataacctgacgtagaggtctactataaccaatgtggctgaatacagtttacatgtcttttgttagattcccaatgcataacgtcatgttatttaatgctctaatgtgtatgtatgttacgcaatatagagttttacaatgtctttgtaaattttttctggatatcattgtactggtttagaaagtaaataaaccattgttgtggtatgatactttggagacattcattttaacgcattgttaattttctgtgttggcaaatgatttgttattctctcatatctacaacttcaattgcaaattaggttagtaataatcttacaaagtagataatagaatacaccatggtaactgttcatttgtaagagttagaagcttgcctatgtcacattctattggatgttgtgtacttgtgccccttgaccaggaaatcaattgtctaatattatcttgccaaaacaggtaaatgacaattatatcaataataaagcttattcggttgataatagataagtttgaactttattatatatgctaatcatagtgaactgatgtgtttatctgtcattcttttttgagattgaattaattcaaaagaaactcgtggttttttttttttatattttcttaattcttatacttctaataattgaggggtttaacttattccagcaacaatccataattcatgactaaatatcttagaacttttcagttaaaacattccaagtatggccaccatgtattgcacacaagattttgtaattgtggcaatcagtttcttctacaattatttttttccaacatatcttctttttttccttaatctgttatgatgtttaatttcttttgcttgtagttgcctggtcggacagataatgagataaagaactactggaacacccggatcaaaaggcgtcaacgggctgggttgccactttatcctccagaagtgagtttgcatgctttgcaagagagtcagcatagccaaagcactggtggacttaatggtggcgataaaatgcatcctgatttcttgcagaaaaacagttatgagatacatgatgctatatttgacagtctaaaggataatcagggaatcttaccttatgtgcatgagctttctgatatttctgtttatggcaataagctaaaaggtcttgattcttctcagtattgtagttttgtgccaccaacatcacctaagcgtaagcgtcttaaagagtcaacaataccatttattgattcctgtgctatgaaaaaaaaggatttatatccatttgatcaaattcaagacaataattctgataagattgcacaatcatttggaatgcaagcaccccttgatcctggtctctcctcgcacagttcaatgtgttacagccattcactttcaaatggcaactcctctacttctaagccttatgaggctatgaagttggagctcccttcactccaatatccagaactcgatttaggtagctggggttcatctcctccaccttctttgctcgagtcagttgatgatttccttcagtctcctacagcaattagtacactggagtcagattgttcttctccacaaaatagtggccttctggatgctttactttatcaggcaaagactatgagcagttcaaagaaccattgttctgataagagttcaaattcttctactgcaacccctggtgacagagctgacagctctattttgaatgtgtacgagacagaatgggaagattatgctgaccctgtatctccctttggtgccacttcaatattgaatgagtgcccagctcttagagccaatgcaaattcattgaacggacagctgccagttcagacctttactggttagtaattttctgtgtggtatggataatgattattgaaaacgtgtcgcacttttatacatgttcgcatacttctttggctcaatctgaaatttcttcattattttggagatttcattttatattatgggtccatgaatacttgttaatacttattttatatgatagacttggcacatttctatgaatacatttatcagttttattgaaagtgcatgtgttaggtttactccttaattcctgtgttaattttgtcagttgctaaagatctattgttattccttgtaaagttcctccttaattctttaattcatgtgcaggcaaccttccgaaattagaatctgttgaccaggtttggactcctaacaatgaaaatctaaccttgtccctgttgaatattactcgtccagacttcttgcttgcttcagattggtatgacctaggttctggacattgcaagaaccaaaccatcacaactgatgctgcaacggcctttcttggagatgatttagccactgacctcaagcatatgactgctggaatttctaaaactatgtttgaaaatccattccagcccctctaaatgtacattcagggcaaaagtaacaaaggggttatttctctgaacgtatgttgaagcctctgtaccggaaatccaaacaagcgccaagtcaagtcaggtgtgttgttgtgcaatggcagtgaataaaatgcacgctgtctgtcggctgttcaatcttcattaagaaaacttctatcagatgtgtgatttgaaactctattactaagtagatttgtgctgattttttttaacatgattgtccaatgtcgatatttcgtgggctgaaaaagattttatgtgtgatttgtagtaccaaaaaattggtcagagactaataatttcttgtggctttgtcactttttttttgggtgttgcatgtattgtaccatcatgaatcttgtgtacacaaatgcttttgcagactcctgatttaattgttgaacaacattgcagttgaaacattggactgcatgtatctggattggatggattaagaatgtcttagttttcttatgtttttttgtttgaactgatgatatttttatcatttatatgattattattaggccaaaaaataataatatctgaaaatttcttaagttgcatttctgggttttggagcatgcctaacttgcaaaatgtttaaaatggctacagcataaaaaatttgtcgactttagcctataaacaataatttttcaagttgttcatggttagctggtcccgcatagtagtataacagaacttggttgttacctagccaacaacataattatgcttctcttgtaaaaaaaaaaggccatacctaactttgaaaactaaaaactaaacaatcgataaaatacgatatcgatcgataaaataatggaatatttgcgtctcatattttgcttgtcaagttattttacaatagagtaaaatgtcgtacattctaatgttagggaaggggagggcagattttaacataagtgggaagaacaatgtaatatttgcatctctttctaaagatgtgtcccgtgataatcaaatttaggtccttctcataagtgcgcatgatcattgagatgatatcaaaatatttaataattgaattattcaaatttaaaatatacaagaatttattaaataaagtaactctacaaaaataattaattcccattcattttttttttgtggaaaataagaaaagaaatgttcagagtaaagaagcaaagttcaaattcaatgccatttctattgatacataatttatttaaatgtagaaaacaaaatttatttttatggaatgaaggaacaatacattatttatatctgaaaaaaggagtctctgatcactgtttcattcttactttcatagaatagccgtcctgttatcgaattggagtactctaacaagaccataatggtttaaaatatcccaccttgatcatttggcttcttacccttattctcatcattggacaactcttctaaagaagattcacttggccctgtgaacatgcttgatgtacat

SEQ ID NO: 349 - DNA, 7075 bp, Glycine max; identical to SEQ ID NO: 294
  source 1..7075: mol_type = genomic DNA

SEQ ID NO: 350 - DNA, 2850 bp, Glycine max
  source 1..2850: mol_type = genomic DNA
ttctttaattattagaataatgctacatgtacaactaatttttggatattaatctataattagtattgttatcagccaatcctgattcagaaagaaatttgaggatatatatataatatttttttcttcggaatttttgtatgtatagaattactcaagtgtttgagtgaacatggatgaaccgtactcaaaagtatttagattctatacaagtgtgataaaatcaaatttgaagttctcattgtttctagtgcggtccattgtttgtagcgcatggtccccagtttctattcattctttactcttttttctcaacagtcgtagttagattataatccctatttataagttttttataagccaaagatttattaatagaatccctgtttacaaatagtgtttattaaaattggcggagtaatttatttatttgtaatttttaataaatttgagtcaatttgaaaaaaaaaagtatttagggtgtcactagtaattctctaaaataataaattcaaaactaattaattcaaaaattaaaaacttaaatatattttttatccttaaaatttagattaatttttatttgggtccttcaaacttaatttctttagtcttaatttcgaaaaatacttttttaatcccgtttgattggtttttggttgtttaaatacataatttatgacctgttttagcagataagaaattaaaaataatatttttttaaaattgaaagataaaaaaataaattcaaatttggggacaaaacctgaactcaaattggaggaacaaaactatatttaagctaaaataaaataaaaaaaacacaactcagagagtttcaacactaattcgtctctacaacaaaaataattatataaaaggatgttgagaataagttctatgacattggagattcttatctcattcatacttttgaaaagaaaaatgagaaatgcctttctactggctatgacaaagatgagaaatccatttatatgttgaaagaaaggggaaatgtgccttcacttccatttcacaaatacacaaaaaaaaaaaaaaatgctagtagtgtaaacactcaaaacactcaaattaagccctttcaacctttctttcttatgagtttacaatctcaaagcccatcaaagttcacgaccctattcatctcttccaacatgagcaacccttcagatgaaagggagcagtgtcaaaagaagacgaaatccaccatatgcgaagcctctaactttaggacatcaaggagaagattctgcagcaacaacaaaaatgaagaggagatgaacaataagggagtttcaacaacactgaagctttacgatgatccttggaagatcaagaagacgctaaccgatagcgatttgggaatcctaagtagactcttgctggctgcagatttggtgaagaaacaaattttgcctatgttgggtgcatatcatgcaagagctgcagaaactgaagggaccccagttagagtttgggacatggacaccaaatccatgcaccaactcgttctaaagcgatggtcttcatccaagagctatgttcttattggaaagtggaaccaagatttcgtcagaagaagagatctcaggaaaggtgatgagatcggatttcattgggatccatataattgcgttttcaatttctgtgtccttaaacaagctatgccagagaattaatttaattttaagtgttagctttattattttactttcaaatcattgaggaaaacaatggcctatatattattcctatatgtaacatacaataatgttattgcaatagcgtgtacttcaacctaattatttaataccaagtttctatattaatgttgtatcttatgaaatccttctattttccattctataaattaaacctaggtctagctagcaggagatctatgcacggttgaaaccttaattgataatctatatctaatggatttgtatgatgagggtgtttaattcctacttaaaccatggatatagtagtagactcattgcactagtacttcctggttgaaggcgagggcactgcattcatcattcatataattaatgtaaaattgtgcaacgcgttattcgagagtacttaacataaaatgtataattttgaacctcgtaactggattactaatcatcatgagttgaaaggttgttgtaatacagttttagataggatgtacacgcgcgcggatacatccttcttaatcaaatcaattaacactttagaagttgtaaggaatgacactaattatattgttcaaataggtttttttttttcttttagatgtcatttcatgtgaaataaaaaatgtgatacttggttataaactcattttcaagcagaactgcagcaaaatctctagcttatattgttctattaacatgtttttgttaagtgtaaactatatatctgcatgaaacatacatagagacctaactgtaaaaattaatgggacatcaaggatatgatgagggggctatatgcatcctctaacctaaaggaaacgatgaatttctttaataattattactacttggataagtcaaaaaatttaattaactaagggatagcacaatactcacttatcaggaatgctgaatttcacatgcctatcattgaacattgatcataagttatctatatttacttattggtgaataaagaaatgttnnnnnnnnnnnnnnnnnnnnnnnnnnnnnnnnnnnnnnnnnnnnnnnnnnnnnnnnnnnnnnnnnnnnnnnnnnnnnnnnnnnnnnnnnnnnnnnnnnnnnnnnnnnnnnnnnnnnnnnnnnnnnnnnnnnnnnnnnnnnntgaatggatact

SEQ ID NO: 351 - DNA, 2834 bp, Glycine max
  source 1..2834: mol_type = genomic DNA
ccctgtaatctttcttcttattaatgaagtaaaaaaaatatcttaacgataatattgaaacaggtattttgttttaaataatctttttcacctgctcactgatgcgcacctctgtttatccctagcctcaagtaaaattgttgtttttacaagtatgttatcatttttcccgtcaccgggatattcactatttttattctcctttttcgctttgtggttacgtttcacagggatatcaagttcacccacatatatatcatgcttaaagttctcatgcttgaaaatgctggtgataactcaaataattgtagttgtagttaatgatgatggatttgtgtctatgatagatttggaataaaaatattagggagtaattttttgaggtttctaacagcgagaaaaataaatcactaaaatcaattttcatgtcatcatttaaccaaaaaatttaacaggaatcaagaatcaaatgaaaaaataatttagaaatcaagactaatcaacatttagttgaaagattaaaaataaaaactttaaataattgggactaaaaatatgttattctaaaaaaataaaaacttaaatatgtttttattttcttaaatttatgttatttgttattttggtccttcaaatttaaatttatttttttggtgtcaatttaaaaaaaaaaaaaaatagtcccttgtgataattgagtttttgcggttaattgtataatttataaccttttttttagcacatatgggactaacaataatattttttaaaattaaaaactaaaaaaatcaaatttaaattttggagacaaaatcaaaagtgaactcaatttgagtaacaaaagccaaaaataaaaaacacagctaagaaaatttcaacatttcgtttctacaacaaaacataattacataaaaggatattgacaataagttgtatgacattggagattcttatctcattcatacttttgaaaagaaaaatgagaaatgcctttccactggctatgacaaagatgagaaatccatttatatgttgaaagaaaggggaaatgagtcttcacttccatttcacaaatacacaaaaatgctagtagtgcaaacactcaaagcccgatcatcatttctttcttatgagtttacaatcacaaatcccatcaaagtttaaaataatattcatctcttccaacatgagcaatccttcagatgagaaggagcagtgtcaaaagaagaggaaatccaccatatgtgaagcctccaactttaagacatcaaggagaagattcttcagcaacaaaaatgaagaggatatgaacaagggagtttcaacaacactgaagctttacgatgacccttggaagatcaagaagacgctaaccgatagcgatttgggaatcctaagtagactctcgctggctgcagatttggtgaagaagcaaattttgcctatgttgggtgcagatcatgcaagagctgcagaaactgaagaagggaccccagttagagtttgggacatggacaccaaatccatgcaccagctcgttctaaagcgatggtcttcatccaagagctatgttcttattggaaagtggaaccaagatttcgtgagaagaagagatctcaagaaaggggatgagatcggatttcattgggatccgtataattgcgttttcaatttctgtgtccttaaacgagctatgccagagaattaatctgtgttagctttattctactttcaaatcattgaggaaagcaatggccaatatattatgcctatatgtaacatacaataatgttattgcaatagcatgtacttcaaactaattatttaataccaagtttccatattgtggtatcttatgaaatcctcctattttcgtgttttcgtttttcccatgtcattgtttatttcgtttctataaattaaacctatataggtctagcatgagatctatgcacggttcaaaccttaattgttaatctatatctagtggatttgtttgatgaggttgttttaattcctacttctgttattatatataattgtaccatggatatagtagtagactgattattgcactacttcctggttgaaggcgagggcactgcattcatcattcatataattgatgtaaaattatgcaaccctttattcgagtacttaccataaaatgtataatctttgaaactcataactggattactagtcatcatgagttgataggtttttgtaatacagttttagatcggatgtacacgcgcacaaatacatccttcttaattaaatcaaaattaacactttagatgttgtaagggatgacactaattatattgttcagatagggtttctttttttctcttagatgtcatttcatgtgaaataacaaatgtgatccttggttataaactcattttcaagtataatttcagcaaagtttctagcttatatagttctactaacatgtttttgagtgtaaactatctacatgaaacatgcattgagacctagctttgaaaattaatgggacatcaaggatatgatgaggggctatatgcatctctaacctaaaggcaatgatgaatttctttaattattattaattattacttggataagtaaaaaaattaattaagggataaaacaagatatactacacttagctggaatattgaatttcatatgcttatcattgaacattgatcataaattatctatatttactattgttgaataaattaaaggaatgttattttggataccaagtttggatttctttataataacaatttattttctccattatcattgaatcctcccaaagttcaagattttactca

SEQ ID NO: 352 - DNA, 2828 bp, Glycine max
  source 1..2828: mol_type = genomic DNA
tttctttatgcaagggattgctccctgtaatctttctttttattaatgaagtaaaaaaatatcttaacgataatattgaaacaggtattttttttttaaataaccttttacacctgcttactgatgcgcacctctgtttatccctagcctcaagtaaaattgttgtttttacaagtatgttttcatttttccccgtcaccgggatattcactatttttattctcctttttcgttttgtggttacgtttcaccgggatatcaagttcacccacatatcatgctataaagttatcatgcttgaaaatgatgatggatttttgtctatgaaagatttgggataaaaatattagggagcaattttttaggtttttagccgttagaaaaataacccgttaaaatcaactttcatgtcatcatttaacgaaaaaaaatttaacaatgaaaataaaaaatcaaacaaaaaaatagtttagaaatcaaaactaatcagtatttagttaaaagactaaaaacaaaaaccttaaataattgagggaataaaaacatatgttatcctaaaaaaattaaaaacttttgtttcctcaaatttatgttatttattattttggtagttcaaatttaaatttatatttttggtgtcaatttttaaaaaaatttagtccctcgtgataattgagttttcccggttaaatgtataatttataactttttttagcacatatgggactaacaataatattttttagaattaaaaactaaaaaaaataaaatttaaattttggagacaaaaacaaaagtgacgtcaatttgagtaacaaaagccaaaaataaaaaacacagctaagaaaatttcaacatttcgtttctacaacaaaatataattacataaaaagatattgacaataagttgtatgacatcggagattcttatctcattcatacttttgaaaagaaaaatgagaaatgcctttctactggctatgacaaagatgagaaatccatttatatgttgaaagaaaggggaaatgagccttcacttccatttcacaaatacacaaaaatgctagtagtgtaaacactcaaagtcctttcatcctttctttcttatgagtttacaatcacaaatcccatcaaagtttaaaataatattcatctcttccaacatgagcaatcattcagatgagaaggagcagtgtcaaaagaagaggaaatccaccatatgtgaagcctccaactttaggacatcaaggagaagattctgcagcaacaaaaatgaagaggagatgaacaagggagtttcaacaacactgaagctttatgatgacccttggaagatcaagaagacgctaaccgatagcgatttgggaatcctaagtagactctcgctggctacagatttggtgaagaagcaaattttgcctatgttgggtgcagatcatgcaagagctgcagaaactgaagaagggaccccagttagagtttgggacatggacaccaaatccatgcaccagctcgttctaaagcgatggtcttcttccaagagctatgttcttattgcaaagtggaaccaagatttcgtgagaagaagagacctcaagaaaggggatgagatcggatttcattgggatccatataattgcgttttcaatttctgtgtccttaaacgagctatgccagagaattaatctaagtgttagctttattttactttcaaatcattgaggaaaacaatggccaatatattatgcctatatgtaacatacaataatgttattgcaatagcatgtacttcaaactaattatttaataccaagtttctatattgtggtatcttatgaaatcctcctattttcgtgttttcgtttttcccttgtcattgtttatttcctttctataaattaaacctatataggtctagcatgagatctatgcacggttgaaaccttaattgttaatctatatctaatggatttgtttgatgaggttgttttaattcctatttctgttattatatataattgaaccatggatatagtagtagactgattattgcactactttctggttgaaggcgagggcactgcattcatcattcatataattgatgtaaaattatgcaaccctttattcgagtacttaccataaaatgtataatctttgaaactcaactggattactagtcatcatgagttgaaaggtttttgtaatacagttttagatcggatgtacacgcgcacacatacatccttcttaattaattaaatcaaaattaacactttagatgttgtaagggatggcactaattatattgttcagatagggttttttttctcttagatgtcatttcatgtgaaataacaaatgtgatccttggttataaactcattttcaagtataattgcagcaaagtttctagcttatatagttctactaacatgtttttgagtgtaaactatctacatgaaacatgcattgagacctaactttgaaaattaatgggacatcaaggatatgatgaggggctctatgcatctctaacctaaaggcaatgatgaatttctttaattattattattatttggataagtaaaaaaattaattaactaagggatacaacaagatatactacacttagctggaatattgaatttcatatgcttatcattgaacattgatcataaattatctatatttactattgttgaataaattaaaggaatgttattttggataccaagtttggatttctttataataataatttattttctccattatcattgaatcctcccaaagttaaagattttactcagttaattagttctatc

SEQ ID NO: 353 - DNA, 4843 bp, Glycine max
  source 1..4843: mol_type = genomic DNA
ttttgttccatgatctaaatggaagacggtagaaagttgttatctaactcttctttcaaattgcttagttttaccaggagaacgggttaacaatgttgcacagagtatgacaacttcagttttttctcatttggataattgctggattgaggaggttccttattagttgaaccaaatcatagcaaatgatgtagctgctgctctatctttctttccatcaataaaatccagcatttacgcctttaaaaaaggcatcatcacttaattgcattatttcaaaaataaaaataattaatgttattcaaattaaaaacattagttataatacataattagttcatacaacaattaagattataaattttttttttagaaacatagcaactaatggtacatattttttaattaagaaaaagtacaaataatactaagtataaatttaaaaatttgtaattaaataaattcgtgtatcacataagtataaaatctagttaagacttgttataggccatatatataagaaacaaataataatatttttttttactaattataaataacatataacatatgagtaaattattgttaaatttcattttttttacctctaatgatattttttttcttataaaaatagttgcatttgtcaaactatttaaaaaaaactaagataagtatactcattgattgaaaatatgcattaaaattgaaaatacaaaacaagtttaagttgaaagttgaaaacaatactagtagacaagcaaatgaacaaatttgattggcgcatgccaaaatggacagtttactatttaagattgagaaggaagaaagggtggtgcctttgcaaatggccaaggcaagcgctgggctttgaaatggagcatttcagaatcatcaatgatgtaacccgcaacccactcaagttgtgacacgtgtataagcattctatctcgttcctctatatataggacctccttcacccaacacaagtgtgtgtagtataggattctcttctttattccttttgtaatttcattcattcttaatctttgtgaaaaataatgttcatcgagaattttaaggttgagtgtcctaatgtgaagtacaccgagactgagattcagtccgtgtacaactacgaaaccaccgaacttgttcacgagaacaggaatggcacctatcagtggattgtcaaacccaaatctgtcaaatacgaatttaaaaccaacatccatgttcctaaattagggttaggtctcacatcaacctcctttttttttaattaattttttgttttcgttttgctgatttgtttaattggttgcttgattctcagggtaatgcttgtgggttggggtggaaacaacggctcaaccctcaccggtggtgttattgctaaccgagagttagtttcgatttcttagcctctgtcttttggtattaagagaaaccttgtgttatttatgctaacatttttgtgttttattatcctcaggggcatttcatgggctacaaaggacaagattcaacaagccaattactttggctccctcacccaagcctcagctatccgagttgggtccttccagggagaggaaatctatgccccattcaagagcctgcttccaatggtatatcatcattattgcagcaatttatcatttttttttatcagatttattagtgttgattgaattttttgatacatgcccacttgttgtagttaaggtaataaacttagcttatattcttgaaataaatctgttggcaggttaaccctgacgacattgtgtttgggggatgggatatcagcaacatgaacctggctgatgccatggccagggcaaaggtgtttgacatcgatttgcagaagcagttgaggccttacatggaatccatgcttccactccccggaatctatgacccggatttcattgctgccaaccaagaggagcgtgccaacaacgtcatcaagggcacaaagcaagagcaagttcaacaaatcatcaaagacatcaagtatgccctacttcaataataatctacaaaatcatcatgatatgtgtgatcagtatgtatttttttttcagcttctaactgttgacatgattatgaactcagggcgtttaaggaagccaccaaagtggacaaggtggttgtactgtggactgccaacacagagaggtacagtaatttggttgtgggccttaatgacaccatggagaatctcttggctgctgtggacagaaatgaggctgagatttctccttccaccttgtatgccattgcttgtgttatggaaaatgttcctttcattaatggaagccctcagaacacttttgtaccaggttggatgcttgcctttatgttccctccacaactttaaattgtttgtatttatgctaattcatttattaacttggcttgtgttgtcaacagggctgattgatcttgccatcgcgaggaacactttgattggtggagatgacttcaagagtggtcagaccaaaatgaaatctgtgttggttgatttccttgtgggggctggtatcaaggtacattgattttatactaatgtcatatcattggtgttatttttactagcactatctatcctttgcatgctttgtttaaaatttatgcattgtgctaattttatatggcaaaaatggagaaacgagttgattttttcaaatgttctgttgatgattggcagccaacatctatagtcagttacaaccatctgggaaacaatgatggtatgaatctttcggctccacaaactttccgttccaaggaaatctccaagagcaacgttgttgatgatatggtcaacagcaatgccatcctctatgagcctggtgaacatccagaccatgttgttgttattaaggtaaattttgtttcacccatttttctgtttctttctcttgtcagggctttgattattctatctgctttgttgcctttgcagtatgtgccttacgtaggggacagcaagagagccatggatgagtacacttcagagatattcatgggtggaaagagcaccattgttttgcacaacacatgcgaggattccctcttagctgctcctattatcttggacttggtccttcttgctgagctcagcactagaatcgagtttaaagctgaaaatgaggtctgtatgcattgctaaataatttcattgcttgattgtattagtcattgtatttttttcagccttctgaggtcactatgttgtggtgattgctgcagggaaaattccactcattccacccagttgctaccatcctcagctacctcaccaaggctcctctggtgagtttaatctaatcttattcaatgatgattgatgagtacatatccttatttctatataggaattaagttgaaagaaacatatcctctgaattttagtatcgagataaaattgttccaattgtgaagttaaatcattgttgttcagtgaatttcccttttttgtccttatgatttttttttatcaaaagttggcaaggttactcacaacagtactctcacaggttccaccgggtacaccagtggtgaatgcattgtcaaagcagcgtgcaatgctggaaaacataatgagggcttgtgttggattggccccagagaataacatgattctcgagtacaagtgaagcatgggaccgaagaataatatagttggggtagcctagctgaatgttttatgttaataatatgtttgcttataattttgcaagtgtaattgaatgcatcagcttcattaatgctttagagcggggcatattctgtttactaggaacatgaatgaatgtagtataattttgtgtactttatcctcctacccttctccatttttagtatatattagaggcaagcgacaacattaataatatacatggtataacgttaaaagtattttcttaaaacctacaaaatcagagattacaatagtaactacatggttacaataattttttactagtcaaaaatcaaatatcaatcctcatgcgattaaaattgatgctaaaattgaactgcagccacctccacttcggttcatatgggctggaatcattttgaaatattgcagtagcaatttttggtgcttaagcacttactgcagtaaaagttttgactttgttaatgtcagggccaggtttccttaagcaattggttccgttgctgcagtaattttccttctcttctagtataagataaaagttggaatacatagtgcaacaagacaaactcctgatattgactgctatttagaagggggaccatttgagattatctcttggtgcagaactcaatatttgatatcctgcaaatcttctggccgtgacatcaaactgttgaaggaccgtagatgaaataacactctatctatatacaacgtaacaatatagtttttttttttcttacaccagtatgaatgagataccaaactacattcccttctactactatatcgaacaataatagaaggagaagatctcataatatccttaatttggttgaaaatcatcccacactcagaaatatctttctcattactgtgaatctgatccactaccaatttactatacgattcagtaatcacaatgagaacttgttgattattgagccaaattagagcctgtaagacaccacttgttcttcaccctccttgactgacatatttgctttaacaaagaagttctagcttgtaaaaaatcaccacctccattccttaaacaggctccaaaatccgtgatgccttcctcaacgaaaaatgctgcatcacaattgcacttcaatgttctaaatggtggaggaatccacgcgt

SEQ ID NO: 354 - DNA, 6155 bp, Glycine max
  source 1..6155: mol_type = genomic DNA
taattttttatatttattttatttttatccttgatatatttaataaaattttttaaaaaaaaatcataattttattatttttatattatttataattttaactatttcaacgactaattttacttaacattaactaatttaataaaaatatttgataagactaactaataagttaattgataaatattaaataacgtaaaaataatatttaatatttttaataacttatcatcttaaaaaataagatagtaatttttttcttttattataaaaagaaaaaggattgcatattgtgtaataagtttattgagaatataaaattatttaatatcataaaaatcaaatcaaaataattttttatctataaaaattaaacaaaatatcaaaaattttaaaacattcacgtatctatttaatcaattaagcaaaatccctttgcagtgcattcaacaaatcatgcgactaatacttccctaatcatagatccaaaaagctttcctttatttattgcacggataataatgatgacacaacagacaacgcaactgctaatttcccgaaagctgacgtgtctcggctggcatggcccgcgcgcactagcatagtagcatatattgcgtgctgcacacactcctccaccttcaccttcaccgattccacgcctccaacaaactcctgctcatgtaaacagaattttatgaataattcagcacgtgacacgattccaatcctcatttgcaaaattaacaactcactttttatagtgttccattataaaatatcctaaaaagatactgttagatggtgtactaacatgtaagtgtaagtgtgcagttgatcgagttgataaatattaggctcatatctcacaagtccatgtcattggcgagtgatcaataaaatactaagttatttagtattatgttctgtcgtaatcctttcaagtcacaagctttaaaagagggtgtaagtgtaacttttcaattcctcaacctcaagataataataaagctaaatcatagtagtgaggagtgactagtacaaacagaatccaaagctttttttttcttcttcttcttcttctttctaacgccatgtctgggagccaccaagagcagccactgttagagaactcgttcatagaagaagacgagccgcaagaaacagcttatgattcgtcggagaagatagtggtggtcggagtcgacgagtccgatgacgaggagaattgggggagagtgccccgattctcgtggaagaagctatggctgttcaccgggccgggctttctgatgagcatagcgtttctggaccctggaaacttagagggggaccttcaggcgggtgccattgcagggtactcattgttgtggcttctgatgtgggccacagcaatgggcctcctgatccagctcctctcggcacggctcggcgtggccacagggaagcacctcgccgagctctgccgagaggagtatcctccgtgggcccggatagtgctctggatcatggcggaactcgctctcattggctccgatattcaggaggttattgggagcgctattgcaatcaggattcttagtcatggggttgtgcccctttgggctggggttgtcattactgctcttgattggtaattcaaccaaccttatccaccctctaatcatttctcctagtttaaatgcttgtaggagtatttagtactattgttttaatgtagttttcaaattgcattaagcgtttggttttatttatggagagtttgctatgtagacagagaaatccgtgaattttggtttttttagggtctatagagggagagggagagaaagtttctcaatagaagtaccaatccaaaacccttaaatttatgatatcataaatttctcttatttttgtttaggtacttacaacattttttttcttgtctaagatctgttgaaattgattccttgattaagctctcagagattttgataggttcaggaccaacccatgataaatgatatgttgtcttgccttgtaagatctagtttttgttatataagttcaaaaccgaagttatttttgaagtctgtgacaacattttgaaagtaactgaaataagtttgttttaagagacattttatgatactttcggaaatctaaggattttgacactattattgataaaaaatttcttgatgtatccaaactcattcaactatttgtccgaaaaataattgtaccaaaactcttagacttctctgagactataacccttagatttatcttgaaccaacatccctagatttctctgggtgctatagcatctctctctctctctctctctctctctctatatatatatatatatatatatatatatatatatatatatttgtgtgtgtgtgttttgctatgtctggtaatcccaaattaaacatgggtacttgtatattttgttgccttgttacagttttatttttctctttcttgagaactatggtgtgaggactttggaagctttttttgctattctcattggtgtgatggcaatctcgttcgcatggatgtttggtgaagccaagcccagtggcaaggaacttcttcttggtaaggagttttatttcattgatttggtcccttttgttttgaatctgatgcagagtttgattttatcattgcaggagttttgattccaaaactcagctccaaaactatacagcaggctgttggagttgtggggtgccttattatgcctcacaatgtgttcttgcactctgctcttgttcagtcaaggcaggttgaccgcagcaagaaaggccgagttcaagaagctcttaattattactcgatagagtccacccttgcccttgtagtttcctttattataaatatttttgtaacaacagtgtttgctaagggattttatggctctgaacttgcaaacagcataggtcttgtaaatgcaggacagtatctagaggagacatatgggggtggactatttccaattttatacatatggggtattggattattagcagcaggccaaagtagcactattactgggacttatgcaggacaattcatcatgggaggttttctaaatttaaggttaaagaagtggatgagggcgttgattacccgaagttgtgcaataattccaactatgatagttgctcttttattcgatacctcggaggaatcgttagatgttttgaatgagtggcttaatgttcttcagtcagtccagatcccctttgcacttattcccttgctttgtctggtgtcaaaggagcagataatgggcactttcagaattggtgctgtcctcaaggtattttgtcattcaatcttgcattttgatctcactggtcacttattgggtgccattatgtatctgataaaggactttgtgatgacaacttaaattcatgttgtatgaagttgctgtctctatatgcctatattattcatctatgatatcaaccttaaaatttaattaggaaggatataatttagaaatggccaaatatatagaccttttcttcttgcagttggggataatttagaacatactcaatctcttttgcaatttattgttagattctaaagtgacaaattagtgagcttggttgtattctcctgccttgataattgaaagttgtgcagtagactactatgttacatctttttcctttatgatcctacgcattatgggctgttgtttatcttgcaaataactatccccatgtcattataagtacttgatacagttctatgggattttttttttatcttttttgttatttatcattttaattgtgatgtgttcaatattaatatgctgtgcagtatattgaatattcctgctgctggaaacagcatatgatgtctgcatggactcaatttactgtaaaatatttaggatgcattgatccttcctcttaccttgaggatgttgatgttccacttttatcctcatttacttcaagtttgtgtcattatttagacttaatttctcataatatacttgtagcccacatctttgaagtagtctatcactcacttgcacacacggtttgcttcatggttacatgcagcctgccaacataattatcattgatgtacactttaattgcgttagaaaactaatatattgttggagttataatagaaaaatagggtattgtaccactttcctttattatgcaggggattctggggggtgtatgtgctgttattttttatattccttaaaattgaactctagcatgctatatttcaagataatttatgaaagagaccaatttgaattctttgtctgtaacaatttgcagaaacagatgcattgtttatactgacttgtattgattaaattagtaatgatagaaaataatgtctgtctgtcagtgttgtctcacctgggaaggtagaaggtttgtgtattcttgatattttgataatataactttaggtatattggacaaaattgacttgtgcagtctgcagacattagttttgaagcctcctgccttgtttctttcctttgttttctcttttggatatggtggattgatgctgtgtgttttcttttctcaattgaacttgctcagtgtattttaacctttagtgggttttctccataacttctatggacattggatgcatttggtttctgtactaacccttcttcccatattctgctcatagtttgttttgattaagtacttaatcacttctgatatgtgtacagactacttcatggctcgtggctgctctggtgatagtgattaatggctatcttttgacggaattcttttcctctgaagtgaatggaccaatgattggcactgtagtgggtgtaataactgctgcatatgttgccttcgtagtataccttatttggcaagccatcacctatttaccttggcaaagtgtaacacaaccaaagacaattgctcattcagagggttgaggttgagtgatcaatctttaaaatcgcggaataggaagtgccatccatttttaagtatgctcatgcttgtttgttactcgtgtgacaagttgatgcaataggtggtggcaccttattctttgcctgtaattataaactatgtcagagtagattttagctctgtattagtactttcaaattttgttgtcaaaatgccttggcaacactctaattagttgagacaccttcgaagctgtagtgtgcaaaccagcaatgtagttctttttccttgctccctcgattttactcatattctatagggtaataatcttttaaggttgtagcatgaaacaatctttcaaggttgaagcatgaaacaaatcttttaaggatgaaacactctgattagttgagacacctttgaagctgtagtgtccaaacaagctatgtagttcttctgtttaacaacttattgagagaattgaatgatttttattacacttacagggtcatagaatttgcagcatttaaaaccaaaatttgatactgaaaattaaggtgcaagtacaggaaattcgaagagattgcaatcctgtggttaaccattttttccctatatttttgccttgaaagttaagtaatgacggtaatgttatttgtactaaactgcatggtccattcagaagcttaggacggtttgtcaatttcaattatgccatactttatagctgcaaggttttgtttgctattatcgcaaacattttttttttagtacaagaaaaaatttctgcaattacttttcattggtcagtgttactgagatatccacgaaacatatttttcattatgctacataccatgaaacaaatatatgccgttatctaatattttaattcaccacctttttctcctttcacaatctaacaagtcttaatgcctttgtactttctgtcccaagcagtggcagagcttgaagaaatattttgaggggccaaaatacaagtatcatttaatgtaaatttaatgttacataaaaatattatcctaaaatctttaaaactaataaatgatagttatttaatttctaatattattaaaagatagtcattttaatctttaaattataaaaattaaaatgtttggtatttaataaatgatatttttataatcaaataattaagtcattcaaataagaattaatttgatatattac

SEQ ID NO: 355 - DNA, 6243 bp, Glycine max
  source 1..6243: mol_type = genomic DNA
tagctgttcagcaagttttttcttaaatcatatttaaagcaaccacagtcctggcttatactttttatataccgaaagataagccagaatttgataactgttagtgttggtcctatcacatagtattatacaaaagctataaatcacgtttcgttactctagtatctatttacttgcttaattttttgtgaaaagctccagcgtttattttgatccatacttgattataacacagcatgacagcaatatattgtcaaaatttacagatcttcctggaaaatacaatgcaattttgccttcagaggttaaagaaataaaataattggctagagttacaatcaacccagataagatatacgcacgtcaacaattctcatcccttgccttaatatcaccggaaaagaattgtcatggtctcatggaggcgatctatctttaccataacatggatttgggatttcaaaataacttctgaattttgtaaaagataaataatgaagtgaacatatttatacgtcaatgtttttatatcaaacatcaaactaataaaaaacaataaatcatattatattgcctttatatgggatgtgtcattctttgcatgcggtcctaatgacacttgcacttggggtcaaattaaccatcagtccatcacatgcacattcattattctctgttcatacatcatagattgtcctttctgcatggaatctgtgtgacacctcgcatttttgaggattctgtgcgatatatatatcctataaattaattcacgtacttagggtgaaaaaaatgttaattcatattgtttactaatatatgtatcattttaattgcaacattaaaatgataataaaataaagtgagtaagtaattaatcatccacacattttagtagtacaaatataataataaaaagcacttgataatagctataaatactcaagtagcttggttggttttctcacaagtcacaagcttttctttttcttgttctttaattttctgattttagcaaattaaaatagtagtgttattggtaggttttggcaaagatgttttcagttccaggggtgtcgggaatcctgaacagaggaggagggcataagataaaagggacagtggtgttgatgaggaagaatgtgttggacttcaacagcgtggctgatcttactaaaggaaatgttgggggactcataggcaccggcctcaacgttgttggctcaacacttgataacctcactgctttcttgggccgaagtgtcgccctacagctcattagtgctaccaaacctcttggttcatttcttcttccttccacataatcaataacttctatattcaaaattaagtgtttaatctctatactctcattcatttcattcaatgaaaaaaaaatcataagacttttaactaaaattaacctatgtaaagaatcgcaaacaaaaaactatataatattaagtttatttactttttttataatgacaaaaaaaattattgtatatggtgcacaaatttttgtactcttaaaaatatatcactttatacatagccaaacatatttattttgtatagtattaacttatttgggtacgtaccttaataatattattatgtgtgtatgtatggtctgtttgtagcaaatggaaaaggaaaagttggaaaggatacgttcttggaagggattattgtgtcgttaccaactttgggagcaggggagtctgcattcaatattcagtttgaatgggacgaaagcatgggaatccccggtgcgttttacataaagaactacatgcaagttgagttttacctcaagagtttgactcttgaagacgttccaaaccaaggaaccattcgctttgtttgcaactcatgggtttataacactaaactttacaaaagcgtgcgcattttctttgccaaccatgtaagctatttatattacgtacttagctagtagtttataattaaaattcagtatgtatatatatatatagttcatttgtccgtctctaatggcaagatctttaatacgttaatttaatgaattgtagacatatgttccaagtgagacaccagcagcacttgtggggtacagagaagaagaattgaagaatttaagaggagatggaaaaggagagcgcaaagaacatgataggatctatgattatgatgtctacaatgatttgggcaatccagatcacggtgaaaattttgctcgcccaattcttggagggtctagcactcatccctaccctcgtaggggaagaactggtcgatatccaacaaggaaaggttagttttctatatatgcttctatttgtttaagtgaattgatattatatgtgtgaagctaatttaatttattttagcattgttcttttacgatgttatggccagccaggttcaaacaagtgaaagtatctatgcgtacatatttattttttattaaaatgattttatgtatataagttattttgtgctatgattctgatttatttttcctaatcaatttcaacagatcagaattctgagaagccaggcgaagtttatgttccaagagatgaaaattttggtcacttgaagtcctcggattttcttgcatatggaataaaatctttatctcaatatgtcttaccggcgttcgaatctgttttcgatttgaacttcacgccaaatgagtttgatagcttccaagatgtgcgtgacctccacgaaggtggaattaagcttcctacagaagtaattagcacaattatgcccttaccggtggtcaaagaactctttcgtacagatggtgaacaagtcctcaagtttccaccacctcatgtcattcaaggtgaagaatttgctcatacttgaattcttgaatgacactttgctcatacaaatggtatcgtaccatatattcacaaacaaatgcaaattaaacttatgttttttttattaaatatttagttccatttaataatgattttcttcatatatagtgagtaagtctgcatggatgaccgatgaagaatttgcaagagagatggttgcgggtgtaaatccatgcgtaattcgtggtcttcaagtaagtttaaatacttattgcagaaacagattggcaaaccaaatttcgtgtccacattaaattagtctgttgctagctagttataataaccattatatatatatatatatatatatatatatatcatgcggatccggagtcacgtacagtttatcatatatattttgacatgcatgatattcttctttaattggagtataatggattgtaggagtttcctccaaaaagcaatctggatcctacaatctatggtgagcaaaccagtaagataacagcagatgcccttgatctagatggatacacagtggacgaggtaaacatattcaagtctcataatttaaccacaggaagaaggaactttaagtaattaaaagtgcttgtgtatgatctgattacaataaatttaatttgtggcacaggcactagcaagtcggaggttatttatgttagattaccatgatgtattcatgccatatataaggcggataaatcagacatatgccaaggcttatgcgacaaggactatcctttttctgagagaaaatggaaccttaaagccagtggccatcgaattaagtttgccacatcctgctggggacctgtcaggtgctgtcagtcaagtcatcttacctgcaaaagaaggtgttgaaagtacaatttggctactggccaaagcttatgtggtcgtaaatgactcttgctatcatcaactcatgagccattggtatataaaacaattcaattcaatctccatctatgatgtatgttatgtctcaattttattttatttttattttttattttgttcataggttaaatactcatgcggtgattgagccattcatcatagcaacaaaccgacaccttagtgctcttcacccaatttataagcttctaactcctcactaccgtgacaccatgaacatcaacgcacttgctaggcaatctctcattaatgctgatggcataatagagaaatcttttttgccctcaaagcattccgttgagatgtcttcagcggtttataagaattgggttttcactgatcaagcactacctgcagatcttatcaagaggtaattaatctctctaaactctaaacataaaactatgaaatataggtacatagtttgttattgatttatattttgtttgattcagaggagtggcaattaaggatccatctgccccacatggacttcgacttctgatagaggactacccttatgctgttgatgggctagagatatgggctgcaattaagacatgggtccaagaatatgtgtccttgtactatgcaagagatgatgatgtcaaacctgattctgaactccaacagtggtggaaagaagctgtagagaaaggtcatggtgatctgaaagacaagccatggtggcctaagttgcaaacaattgaagagcttgttgaaatttgcaccattatcatatggactgcttcagccctccatgcagccgttaactttggtcaatatccatatggaggtttcattctgaatcgcccaacttcttctagaaggttgcttcctgagaaaggcaccccagaatatgaagaaatggtgaaaagtcatcaaaaggcttatttgagaactattacatcaaagtttcaaactctagttgacctttcagtgatagagatcttgtcaaggcatgcttctgatgaggtctaccttggccaaagggacaacccacattggacctctgactcaaaagcattacaagcctttcaaaaatttggaaacaagctcaaagaaattgaggaaaaacttgcaaggaagaacaatgatcaaagtctctccaatcgacttgggccggttcaactgccatacactttgctccatcctaacagtgaggaagggttgacttgcagggggattcctaatagcatctctatctaagggagcatgtggtctactttaattacagtactgtacctaccttccaataaaaaagatgcaaggctagagatccaataaatcttgcatcctatctaatgtttcaattatcttgtgttttaatgctgtaatggagcctacaatttgcaaattaattaagagcaccgagcactattagtttgcgtttagcttctgtcatgtttattaagatatatttcgcagattgtaacacaaaattttgtggcaaaacaagcttttttttttcttattgaaaataattgtactttgataatagaaaattcagcaaattaggccttaaaaataattatttagcagttatttgcgcttaattgttaaagaattgatatttcgtgaattttgattgcagatataaaaattagaggtgttaaaagcaaatagaaggaaataattagaaaggctcaactcattctctcgcgtagcgtgtagcgcgtgctaaacgagacgttaagcacgagagtcagaatccgttactcgcgcacagcgcacagcacagactaagtggacaaaactgacacagaacacgctaagcgagaggagctcgctaagcacaagatctgaatgcgctaagcgatgggtatcgcgctgaacgagcctatgaaaatccaaaacccactccagcaactgtaaatagagagctcagtcaaggaaaacgacacaatgagtctcagagtactcctatcactaccttaagcctgaaaattcctcctctcttctctctatcaattgtattcattctttcttccatccctctcattgtaagtccctcaatgatcatgagtggctaatcccctggttagggtcaggcaggcctaaaaagtcaaacgatgtatggtgaacttcagatttatcaatgcaagaggatcccttttcaggtttttctgttctattttcttttttattttatcttgcattctcatctttattttcttttgggggttagttactcgggagaggataacttctaataagatctaaagaaaagatgcatgcattagttttaggagttagtctctcgggaaaggataatctctaatagaacattaaagagaagaaatcataaggtaatcattgctaggcatagaatggtaactttatgctcatgcattcaacaaacatctaaaatttattattcatgcattttatttattgagtcttttcaaaagcatttaggagataggtaaataaaataggtttgtcatcgtgaggcatc

SEQ ID NO: 356 - DNA, 5744 bp, Glycine max; identical to SEQ ID NO: 304
  source 1..5744: mol_type = genomic DNA

SEQ ID NO: 357 - DNA, 6316 bp, Glycine max
  source 1..6316: mol_type = genomic DNA
tttttatattttgaaatcatatttgaatgctttcgtaataaaaattaacttagagtaaaatgcattacacaattacacaattttacatcaggcaaaaattatttaaaattacttcaatttataattatttatggactcaaaatctaggtatgattgtatgaattcatttctaatgtaaaattaaatatctaaaaatatatctaaaatcaattatgaattgagaattaactttttaacgttaaaccaaacatgcactcaaagttatttcaacttataattcattttaaaattttctataagataaaatcaaacatgtaagaatatatttaaaatagatccaaaatcaattttttaacatcaaagcaaacagacacttatccaaatatttattactcagattatcaatacaaagttccaattttgatcggaaaaaaaaaaccaaaagtacctatgtatgaaacaacttataagttttatttattttcaattagttttataagaaattaattagtgaataaaaatatttattacattaaaaagtaaacaaattactgtatttttagtcgtaaaaaagctcaataaaacttataaaaataatgttgtatcttcctataaatcctcttctcgcttttaaaaaaagtactattaaataaaaaaaaaatattaatgtcttcagtatatgaatcatgttaaaatatttattataaaaagagagtaagaaaatgttgtggggaagatttaaaattatccaattcacaaatgtactcaatagtaactactaactagtaagaaggaaatgttgaatataataattattgatttttatctggtttggttctttgcatgcacgtatatgacagtttggtttgcacattggagtctgagtccgctacaagacatttatgtatcatcatcttcgtttcttagtcttcctccttaattataaataccaccaggggctgtgcttggcatcctcacccaaaaaaaaagatcatacatagtagtgttggtgggttgcaaagatgcttgggggtcttctccataggggtcataagataaaagggacagtggtgttgatgcgcaagaatgtgttggacgtgaatagcgtaaccagcgttgggggaattattggtcaaggtctcgacttagttggctcaacactcgatactcttactgccttcttgggccgatccgtgtctctccagcttattagtgctaccaaagctgatggttccttttcttctttcttatttttcctaattacttcatccatgcatgcatgccttcaattctcacctatgttgctcatcaactgatgccaacatctattagtgttttcgtttaacggtgtttcatttcaatctatcctctcacatacttctccgttcaacggagtttgaattcgtgtaaaacataaaccatacacacgctagatgtttataatcatgacgcgtgtcctccttgtgtgtcttcattatttgttatatgagatttgaatatgttattaattattagtatagcatgtgcagcattctcactctcttaccaagctagctacgtttgcacgcacgtctataaatgtttaattttttgtttatgtgaaatgtgaaactaagtcatggtagaacggcttcatattggtttttacttttgttttcactctttcttttctttgggtagccaacggaaaagggaaacttggaaaggctacctttttggaaggtatcattacttcattgccaactttgggagcaggccaatctgcattcaaaattaattttgaatgggatgatgggagtggaattcctggagcattttatatcaagaattttatgcaaactgagtttttccttgtgagtttgactcttgaagacattccaaaccatggaagcatccactttgtttgcaattcgtggatttacaatgccaaactcttcaaaagtgaccgcattttctttgccaaccaggtcaagtataattaatgaaacttaaatataacttttaaatcttcaataactttgtttgttttctctagttatttcatttttccaaaaaaaagtttttgtcaatacccgagtgtcaattaatgtggtttattttgaagttgttgaactttaaggcatcaatgaaaaaataaagttaacaaaacatattgcagacatatcttccaagtgagacaccagctccactagtcaaatatagagaagaagagttgcataatttaagaggagatggaactggagaacgcaaagagtgggaaaggatctatgattatgatgtctacaatgatttaggtgatccggataaaggtgaaaatcatgcccgtcctgttcttggaggaaatgacacctttccttatcctcgtagggggagaactggtagaaaaccaacaaggaaaggttaggcttctatttctatttttaaattactctatcacagactcaaatctgttcttcaattctataatatttatgaggtcttagcataaatgtacttttaatatgtcaagagtcatataactttgaattggtatattgttttagctagaagagttctacatgtacatgttaacataaaggttgactgtttctaatcaagtaatcctaaattatcaaggagtacttagaaacaaccatttcattaaactttaactgtttttcaattatgagtttgaaaatttctgtttttgttgctaataagttctgctattttcattaaacagatcctaatagtgagagtaggagcaatgatgtttatcttccaagagatgaggcttttggacacttgaagtcatctgactttcttacttatggactaaaatccgtatctcaaaatgttcttccattattgcaatctgcttttgatttgaatttcacaccccgtgagtttgatagctttgatgaagttcatggactctattcaggcggaattaagctgccaacagatataatcagcaagattagtccactacccgtgcttaaggaaatcttccgaactgatggtgaacaggcccttaagtttcctcctcctaaagtaattcaaggtatctcataatattaagtacctgtatctaaaatggcgttacaattaacaacattggagtgctaataatggatatctgaattaatcctatttcactaaggatatttgttattatttgagcagtgagtaagtctgcatggatgactgatgaagaatttgcaagagaaatgcttgctggtgtaaatccaaacttgattcgttgtcttaaggttgagttttctttgcatgtcaagtttgtgattgatatccttgattggcaggatgacccaatggaggaggatcatatatatttccttataatttattattgcaggatttccctccacgaagcaagctagatagccaagtctatggtgatcatactagtcaaataaccaaagaacacctagagcccaacttagaagggctcactgtagatgaggtatataatatgataaacttgtgtttcgaaataaaattttatttgatgaattctgttattttatgtgtctagtttttattttagatgatgtttctatgaataataagagtaaattgtatttggttggaaaggcaattcaaaacaagagattgttcctactagatcatcatgacccaatcatgccatatttgaggcgaataaatgcaacctccacaaaggcttatgctaccagaaccatccttttcctgaaaaatgacggaactttaaggccacttgccatagagttgagtttgccacatcctcagggagatcaatctggtgcttttagtcaagtttttctgcctgcagatgaaggtgttgaaagttctatttggctgctagcaaaggcttatgtagttgtgaatgactcgtgctatcatcaacttgtcagccattggtatacattttctcaacgaaataatataaaaataaataaacttatatatatatatctataaaatgattattaatatcttttgatggataataggttaaacactcatgcagttgttgagccattcatcatagcaacaaacaggcatctcagtgttgttcaccctatttataaactccttcaccctcactatcgtgacaccatgaacataaatggccttgctcggttatcactggtcaacgacggtggcgttatagaacaaacatttttgtggggaaggtattctgtggaaatgtctgctgtagtttacaaggattgggtttttacagatcaagcattgcctgctgatcttataaaaaggtaaatcatatatcttacaataggaaacatgaaactcaatttaatttatagttaacaaaaaattgaagacacttttgatgttatataattaatgtcatgtgatatagaggaatggcaattgaggatccatcgtgccctcatggcattcgccttgtgatagaggactacccttatgctgttgatggacttgagatatgggatgctatcaagacatgggtccatgaatacgttttcttgtactacaaatcagatgacacacttagagaagatcctgaactccaagcctgctggaaagaactcgtagaggtgggtcatggagacaagaaaaatgagccatggtggcctaagatgcaaactcgtgaagagctagttgaagcttgcgctatcatcatatggactgcttcagcacttcatgcagctgttaattttggacagtatccctatggaggtttaatcttaaaccgtccaactcttagtaggcgattcatgcctgagaaaggttctgctgagtatgaggagctgaggaagaatccccagaaggcttacttgaagactattacaccaaagtttcagacccttattgacctttctgttatagaaatcttgtcaaggcatgcatctgatgaggtgtaccttggggagagggacaatccaaattggacatctgatacaagagcattagaggcttttaaaaggtttggaaataaactggcacaaattgagaataaactctcagagagaaacaacgatgagaaactgagaaaccgttgtggaccagttcaaatgccttatactctgcttttgccttctagtaaggaaggattaactttcagaggaattcccaacagtatctctatctgaagaggtttgtggttccttaagttttgtggctttgaataaaagatagaagagaaggaatctgaatttcttcatccaacctgcacatggtaatctagtgtgtttgagtgctttcatgtttggctttaataaaataaaagcagttgttttgtaaaatgttcagaatcaataaaagcatttactgctttgctttgtgcgctaacgttagtcatctaacttgaatagaaataaataatgagttggacaaaagctacaacggcttgataacccattgttcaaatataatccgtaatctttgttttattttttgttacaagagatataagaaacaaaatatataatgcaaactttattattaaaattatattgggtaagaggttggtgtctgaccacgaatttgatggtcaacctatattgataacatcacaggacgcaactaactacccaaatatcgttattataacatataaatgaaagtttacaaattgaagagaaccttgtgcacgaggataacttttttatcattccattcagtctattaacaatgtacatgacataaaattagtaaatataaaaaagaataatccttgaaggcgttaaactcgaacaaacctggtcaattagaagattttgaagtttgggacaatgcttgaatttgcaatacatcttgaatagtcgaattcaatgctggttaaattgggaaattcgggaatcaagccatcaatgatttccacttcgtcatattccatacctaagaggtacatcccaacaacaaaatatcatagattcccatcttccttacaaatagaaagaaatgacaaacaaataaagtattcatgcgcaggaactcaacgttataaacaactttcaatggaattatatgtttacaaataagagctctgactaatttcggcaattttttaaattttgcttcaatttcatagctatcaaatcttaaattttgctttaatttcatgactatttaattacaaaaattttattattttttaaaattttatttatttttaaataaaatctttttaatttattttacgaaaaataaaatattacatgagacatttgatccttacattttaaaaaaattcaaaattttagtttttttattttaaaatacaaacatttaatttttatattttagaaatttcctaatacttgttcccgtattttaaataatccataat

SEQ ID NO: 358 - DNA, 8691 bp, Glycine max
  source 1..8691: mol_type = genomic DNA
taatacaaactaaatttgagtttttacaaacccaatttatttaacagtttttatatattaaagatagttaatgtacagtttttataatctaaattaaataaataagttagaggatctgattttacaaaaatattttaaaaaatgtaattatcaaccacaaaaacagaaattggcacagttataaattaaaccaaaagttttataatatttttacatcattcataacgtgtgtttccaataaaaacaaattaatatgttttacacttgaaattatttatccatgtcttgtgtacacatttcaatatgaaatatacagtcgagattaatttaaatccacatcttaattaacttcaacattttataatcatttctatcacaatcagttttacttaattttaaaacaaattgacaccaaatatagaacccagtagagtaattagaagaagagacttttaattttaaacaaagtttaattttcatgtatgatcaatatatgatttttatattattaattaatgaaacaatattttaaaataaactcttttaaataattttatttcaaaatatcatttaataaaatgacttcgaattataactatttattttcattatttaaactcgcaaattacaaaatccataagatatttgttggagacgaagcattttccaaaacggcagcaatctgtacttgtgagaaggtaaaacaaacaaaaactattaactatattacatacaaaaataaaataaaaagcaaaaacaatcgatcacaacaacgaatcacggttgcaccacgtggcgcaccatgagaggaggggattataggtccggtaccagccagtggacggtaacagtacactgaatcaagggaaaacgacggcgtttcatggagctacttggtggagtcttatcattcatatattattatttatatttattcatgctattatgcatataaatacgtgtctttgggaagagtcgtgtataccaaattgcttaaggtcttcaacttcacccattcatacgtggtgttgttactgctgctcttttctcttttcttttctctttagttctctcttcccctttctttttctttttcttcttcttctgagcttgtttaagcttttcttccattaacatattatcacaatgtgtggtattcttgctgttcttggttgttctgatgactctcgagccaaaagggtccgcgtgcttgagctctctcgcaggcaatgaatttattcttctgtgtttagagttcgtagttgagtctaatttcgatgcactataatataaaagtttttacttgttaaattgatggatgatttttaagattattatcataaaaattaataaatttatcatataatatcatctaatactaaaattaaaactcataactacatatatacttttcacacttcttaatattagaccaaccttaatgattcaaatcatacttatttattagtatatatattttttagaattttataatcttaaaaggtgagtttaaagttaacttaatcttaaaagttagtttaagggatgagaattttttagttcacgtgaaacttgagttttttttaatacatttccgcacgtctaacctttcttaggcttggtgtgtgatcttttggatgaatcttaaatataatctgataccatcttaaaatacaagtttaagtttaactcaactcaaaaactaatttaagaaataagaattttcccttatatattctaaatcaattttatacttatgttttttccaataatacttttattatataactatttactttttgttatgagttaataatttctttacacattcaatgttaaaaacaatgctatctttcggttagtctacaaaccaacctcgttttaatatcatatagtttggttttcattaatttgggtgctttggattacaagttcatgctgaagaattgatggtaccagcaccagcaaatcctttgttggaagtgattgatttagataacaaggcaccagtctatttgacagggttttgtgatagagtcagtgtatgatttgtgacatttcaatttgaagagataatcagttatatttatttattttttttataaaaattagtaaaatagtttttttttttaaaaagaataagtattttgacaacatatagaataaatatgggacctaggtgacgaaattcatgacctcgtttcaactttcaactggttcctggtccgtcaaaaactttaaaggaatggattaatcatggtggagtttgaaattaaaattgctttttatgctgggactcttatgtccatcagtgagatttaggatacatgacgttgataaggttaagtgcgcaactatgaaataaaatatactctgaagtcactgattgtttatgaataagataaagtagtgagatgatcgatcgtgagctcctggttgaaattcaattattggtagtaatatttagtgagaaccttccaaaagtggatgacgattgaaaatcaaataattaaaagggattacttggtcgtagaattattcgattttatttaatgaaaatgatttttcttattttgtttttaacgcttacacatatatgacaacaaaacatctattcaaaattgtatgatttgtgaataaaatttaaattaagtttcaagtttaataagcatgtattattagtataaatttttaacatagcatctaattttaaattattgttgatataatttttaagtaattattataaaatataacaaacatgctatacatgtcaatttatgattgaacctcagttttaaacaacaaaaaatgttatatattaatgatacaaaataattttacattattatttaattgtttgattattttaatatttttattaatttttataataactattagtacttaaattatgatatcaggtttattgacaatatgatttttttttatgttgaatgcatgtactttttctgttttttttagtgttgaatttttgaaaaaaaaattatatttatctatcatttgtaaagtttaagatcacattaattatacttttatttgttttataatatttaattattttaaatatatatttattgtggagtgaaaaaaaataaaaaaataaaaaaataaaattttatgaatattttattataatcaataaaatttattgtctttttagatttttatataacaaccttgaagcacaccttaaaaggaagggagagagtattatttattcttaagtttgttaaattctgcttattaacttctcaaatcaaacaatgatacataaatattttctgatattaaatggttagggttaatggcatgttacataatttgcatattattgaaatttgtttgtggttgttgacgtcacagattgaagcaccgtggccctgactggagtgggctccatcaacatggtgactgctttttggcacatcaacggttagccatagttgatcctgcttctggggatcaacctctctttaacgaggacaaatccgtcattgttacggtagaccattgcctaaacaacaataatagttctacacgatagtttttttttctctttcattcatatgttattatgatgatattggcaattttaacgagacaaacccgaatcttctataccatcatgatgtgttgttgtgagggttgatgcaaagtgttttgttgttatttatttatttcagttattaaattttgtatcttattgttctaatttaatggatgtaaatcatgattgatgataaatcgtcatataactttaaaacaggtaaatggagagatttacaaccatgaagagctcaggaaacagctgcctaatcacaacttccgaactggaagtgattgtgatgttattgcacacctggttagtaatatttaagatttatgtataataacttctcaattgagatgaattaactttaactaagttatttgtataaagtattttcgactttaatgatcacaatgaagatagttcatgtcatgggtgcgtgcatcatgtattaagcaatacgactattttttttttttaatgaaaatgacaggcaaatgaatgatcagcgttaaaatataaaagtcacgtaattttcttaagtaatacatttaaataattttcaatcttgattatactaatatataattatgatgtcaaaatttaatactaaccatacagtcatgcatgaatcattaagattgttttacttaaacatatttgattatccattagtcaaaagaagtttttgaagatcatttctttcatgactgtcattttttcttagtctaagctaaaaattgaagcaatcaagattgaatatgtagttcttatcaactcattgttattgatatttgatgttaatgttttcaatagtacgaggaacatggagaagactttgtggacatgctggatggtatcttctcatttgttctactggacacccgtgacaacagttttatagtggctcgggatgctattggggtcacttccttgtacattggatgggggttagatggtaataattcataatatattcaacttttgaattgaattcatgggtttttagtttgtacttgaattttggattgaattgaatggacaaagtgtgacaagtttggtaccctctctgtattctgcaggctctgtttggatttcatcagaaatgaaaggcctgaatgatgattgtgaacactttgagtgttttccacctggtcacttgtactctagcaaagaaagagggttccgcagatggtacaatcctccttggttctctgaggctattccatctgccccttatgatcctcttgttttaagacacgcctttgagcaggtttgattcacaaaagtctaaggtcatgtttgaataaacttctctataaacaaaaaaataggaaaggaaaattagaaagtaaaatttaataaatttctactataaaattattattagcttatatataagttaaagtcaatttttgaaaaaattaaatagaagaacacaaattagtttatgcacaagttaatttcaactaatgggaaatgcttattttattttatatttttattttcttctcctataagtgtttatggagaaatttatgcaaacaaggcctaaggacaatcggaattggaacttcatgtaactcttaaagttccttttttttgtgcaacaatttttgcatgaacaaaataatctatagatacaatgaatcaaatgctcaagataaatgttaaataacttcaacaaacttcattaaatagtgtgtactattatttaggtcttagtaaccaatgttcttagggtattagttaagaaactaaaatgataaagtatttataatgaagattatagacaatgtaaaaaaaaagtaatggataatgtaattttatgcattctaataataatattttttttttaatttcttaactaatatccttaggttaacatttgccttattattttaacgcatcttgagtaattgtttggttgggtccataggcactatggtcatgctagaattactgtttgaaagctttttcatgaataaagctaacaaaaatgaatgtgattacaggcagtcataaaaaggttgatgactgatgtgccttttggtgttctactctctggaggtttggactcttctttggttgcatccatcacttctcgttacttggccaacacaaaggctgctgagcagtggggatcaaagttacattcattctgtgtaggccttgaggtgtgcaatctaatcaaaactacaaatgacattgcaaatttaatagttgttttcatgaaatcctttaatattgtattaatcttttgccatctcatattgagtagggctcaccagatttgaaggctgcaaaagaggttgctgactatctaggcactgtccaccatgagtttaccttcactgttcaggtaactaaatacatgaaaaagtacttttcagctcacaatttggggtccttcaatttattaataaataattgatatatggtgtgtgcaggatggaatagatgccattgaagatgttatctaccatattgaaacatatgatgtgactacaattagagcaagcacacctatgtttctcatgtctcggaagattaaatcacttggtgtcaaatgggttatctcaggagaaggatctgatgagatctttggagggtatttgtacttccacaaggcacccaacaaggaggagttccacagagaaacatgccgcaaggtcatagatttatattgttcattgacataaacaatacctagtgggataaagctttgttgttgtttttgttgttgtattgacataaacaatataaggggttgaagttcaagggataatagttatgttttttatatgcagatcaaagcacttcaccaatatgattgcttgcgagccaataaatcaacatttgcttggggtctagaagcccgtgtaccatttttggacaaggcgtttatcaatgctgcaatgagtattgaccctgagtggaagatggtaagagtaaagaatatgatttggctggttcatgactttaaaatttttaagacacttatttagctggtttactaatttaatgttcagataaaaagagatgaaggacgaattgagaagtggattctgaggagagcctttgatgatgaagagcatccttatctgccaaaggtactatgcaatttgctgcaatgtctatagatctttgccaaattagttggccaataaaactaacatctaaacatttattttgatgcagcacattttatacaggcagaaagaacaattcagtgatggagttggctatagttggattgatggccttaaggcccatgctgcaaaacatgtattgaatccaacctttttactacaattcaatgatggggtttgctattgtcatgaaatttattttgcttataattggttcttgtcaatttttccataggtgactgaaaaaatgatgcttaatgctggtaacatttacccccacaacaccccaaaaaccaaggaagcatattactacagaatgatctttgagaggttcttccctcaggcaagttaatcaaccaactcttaatttagtttcttaaaatttggatttaagcctaactgaatcccagaagctaataggtgaggattgcctccaacatatatacactattttgaacatatcactatccaatgtagaatctgtaacataattaaataagggctgattcaaatgtgtgtttgttgattttgttctgcagaactcagctaggctcactgttcctggaggagcaagtgttgcatgtagcacagccaaagctgttgagtgggatgctgcttggtctaacaaccttgatccctctggtagagcagcacttggagtgcacatttcagcctatgaaaaccagaacaacaagggtgtagaaattgagaagataatacctatggatgctgctccccttggtgttgccatccagggctaatacaaagatgtgacaaagaataatttgggcgacaatgaagataactaagctaaaggtgaatgaaaaatttgcctgcagtgtaatttcatctgggcaaagcttttatagtttatagttataaggctttctaaaaagtgttgcgtattgtattatcttgaatgctgtgatttgaagtcttaataaaagtgtttcctttatcagttcataatgaatgcaaagtccattattttaggctgtattttatttcacttttaattagctgaagcatattcgtcgtgttaagtaaaaatgactttgaagtctcaagatactggatactgaaaagaaaacgattcacagtaacacaaaaagtatgaactcaaattatttgatatgtatgagattttagaaactactccgtgaaatactggagtataataaaaaatgcatataaattgaaaacggacctacacgtgaagtaacatcactacctgagaaatgagaattgttagtcaaggcataacattggaattggaagaaaaaaatagtgttaagtagaatgggtcttgacacagacactagccaagcccaactatagctggacattatgatcacaattaagagcccaaataaatagcagcctagttctatgccaggcagttgcttcctgcattccaaaaattgttttatgcaccaatttagaatttgttttttttttttacctttcggattggccaatccagaaagttatttttaaagtgcatgaagcaattgccttttatatatccttgtactcggtgcaaaaagtttctttttttttggtggactaagaaaagttttatttacttggtccacttaagacaaccattacctatatactgatcctgctacgtaccggaaagaaaaatcaactcagattctgctacattgctattgaaatgtgcccatgaaatagatgccgtttgattttttgagtggttattttatgtttttatttttatttttaaatttctaagatctataaaatatgtaccggtggaaatttgtcgaaactacgtaatcttgaattatgtaataattctcaaagggagaaaataccatattgtctaaaatcatatatatgtttatgactgatttttatgtgataagttattaactattttttataaattgaaaaatggagttacgaattatgtgtgaaaattaaccagatcacaaaattcta

SEQ ID NO: 359 - DNA, 7152 bp, Glycine max
  source 1..7152: mol_type = genomic DNA
tttaaattaatatcggaagactttatattaagagacatttttcttttaaaatttgatccttttcactaatgtgactaactatctaattatcttttgctgtaactaatattttattttaaattttgattaatatatttttataggcttaattattattttgatcttttattttatttttgaagtttaatttaatcctcttattattaaaaattaatctcatttaacttgtcacttccacaattactctttttatttataaacaatgattacaataataaaaaaataaagtatttacataactaaattttgattccataatcatgtaatttcataagaatcttaattatatataaaagaagcatatttttttttcagtttccaactatttaatccctatcaaaattattgattaacaaaaatgattttatattttttaattaagtaatttaggattcaaatcttaatcttaaatattataataaatcatattgaaaaaaatacttacattatttatgtttataattttcaatagagatcattattttttgcagtcaatatttcataatttataccaataaaaaaagtattgaatcacttcattgaaaaacacaacacaacttgacgtaacacttgattgattctaatgaattctcaaagaatttaaccaaagaaaaaagtatttaaggaataaggattaacggataaacatctctctctctcctgtattcggagacaagacaaaacgggaagcagcaaatcgctcagcacaaacgagaaaaggaatcaaataatgaaaataataaaataaaaactaaccttaatacaaaataattattaaatgaagtgagaaaaatattccatagcaaaccacgtcacaccacgtggcggttggcaagacgaaagagtcggtcggtggtcccggtgtgagcgaccgggaccacccggtatccagttaacaattcccacggcattgcagaaagcgacatcagacaaaaaacgacaccgtttcccctccaccctttgcatataaatgcgtgtacgttgttatgtggatcacttaactctttcaacttggaaccgttcttcgtgttctccattccctctctcactccttcatctacgtaatttccttccttcctttctttctttctttctttctttatcttctcatttttctcaatacaatttttttctttctttctcaagttttgctacttttctcttcttaaccatagttcacatattatatcatcacatatcatagtgatatcatatcacaatgtgtggcatacttgctgtgcttggttgctctgattcatctcaagccaaaagggtccgcgtccttgagctttctcgcaggcaatgtttctctctttgtcttcttatatatacacacacgtaccaatatcaaaggaagaaggaaaaagaattttgatggtttcttttcaaataccctttacttaacttcgatgttttgtattcaaagtttcttgttttgatgcatgttttccctgcccaaaatcttccccagctaaagttttctatgctaatattgagaattgagtgttgatgggaaatggaaagtggaaaattcagcatgatggtaacagtattttcagtaactaatatactgaaatactaactagttgtgaaaaattattattatattttatacactaaaaggagacagaaaaaaccatcaaaagggtggggcttataatttgtttccttgtgtttaactgtcatggcggtggtatcttctagggggaaaaattggtggacactaatatttagttaacacctagagagagagaaagacataaaaaaagaggaatatatgtgtgtaattaataatatgacgtgataaagaaaaagttatataaaaataagaagtgttagatgaaatatacggttaggtaagagtgtatatattatcacatccattttcaactggctagtccattcaatattttaaaaggaacgactgaaacatacgtaagagttaaaattaaaattattgctttatgttggggcccggtcatcatcttttagatgtaactactagtatttaaggataaacatgtttggactttgacaagttaagtggattctagaataaataataagtggcatgtgggggcccaccttgctgtgaaattattggtaactttgtggtgtaaaagtgcaacaaaagaacaaacagttggaaacaagtatgaaaaaggagttaatttgtctttgaagtgttaaaggaaaatttcaagggtcatcagttaagaaagtgcagtttgaataagtagttaataatttaccatttattgttttgtgtttgttgatgtcacagattgaagcaccgtggtcctgactggagtgggctccaccaatatggtgataactatttggctcatcaacggttagccatagttgatccagcttctggtgatcaacccctcttcaatgaagacaaaactgttgttgttacggtgagccttgtgatattcaatgattaaaattagttttatagttattcgatcataagataatattttatatcaaatttgtgaatttttataataaatatcttaaaaattatattaatagtaacttttttattggttgatagtgtaaatatttttatcttcttaaccattaaactcgtgtaggataattattaaaaaatatccaaatttcacattaattgtcttaatcttatatatttgttggacaacttcgcttaaagttaattggttttaagataaatttaatcataatacttaagttgtaatatataaaactagaatgtatcccatagtaacatattcgatcttttttatgcttttatttactaatctcaccaatttcactgcgataaattatgactcatgttaaatatgatccactgaaaaccaggtgaatggagagatctacaatcatgaagaactcaggaaacaattgcctaatcacaccttccgtacaggaagtgattgtgatgttattgctcacctggttagttttctctatgtatattttgcaacaaattttaacctgatcatatatacataaaaaccagaagaaactttagaaactttgttttattcatcagttattcttattctaagttttgaccaaaatttccataatttttaatcatatagaatatggctgttacaaatgattggaattcctgttcttatcacttgtttcttgatggtgttattttagtatgaggagcacggagaaaactttatggacatgcttgatggtatattttcatttgttctgctggatactcgtgacaacagttttatagtggcacgggatgcaattggggtcacttccttgtacattggttggggtttagatggtaatgttctaacatgtgccctgtttttgaattgaattcatgtgttctatttgaactaaaacaacatatttgaattgaataaatggtgacaaagtttggcatattcttctgttcaggctctgtctggatttcctctgaattgaaggggttgaatgatgattgcgaacattttgagtcttttccacctggtcacttgtattctagcaaagagagagcgttccgcagatggtacaatcctccatggttctctgaggctattccatctgccccttatgatcctcttgctttgaggcatgcctttgagaaggtaagattcatacatgacacaacacatcattgtatttgaacgtttatccaaaaacacctacttttggaagccttggaaaagcttctttagaacttacttggacttacaaaagtagcttgtaaccttcttataaactcattttagcttatttcaaaaaggttcatcaagaagttatcaaaataagctattttaacttattctaacaagctttcaggtgataaacacgtattgaacaagtaattaattaagttgtttatccaaacgtgcactttaccacactctttttttttatcggcaaacattagttttgttagtagatgggatcgaacccgtgacctttcccctttttccttctcctttaatcatccaacccaccttatatctcctgctctttactacactatagctgatataagtgaatgttattgcaggctgtggtaaaaaggttgatgactgatgtgccctttggtgttttgctctctggaggtttggactcttcattggttgcagccgtcacggctcgctacctggcaggcacaaaagctgcgaagcaatggggaactaaattacactctttctgtgtaggccttgaggtgtgtatgtaactgttcttgaatttgcagtggatttgtttaatataagaagaacaccatgaaatttgtcttaatctttaatcatcttatgttgagtagggtgcacccgacctaaaggctgcaaaggaagtagcagagtacataggaactgtccatcatgaatttcactacactgttcaggtatatttacatgagatagtatttttactgctaaaaaatttgggggctttttgatgtacaacatcataattagtaaatgtttttatatatggtgtatgcaggatggcatagatgccatcgaagatgtgatctatcacattgagacatatgatgtgacaacaattagagcaagcattcccatgtttcttatgtctcgtaagatcaagtcattgggagtcaaaatggttatctctggagaaggatctgatgaaatctttggagggtatctatatttccacaaggcacccaacaaagaagagtttcaccaagaaacatgccgcaaggtcatacagttatcatgtttcttatcagaacaatataagtaaatggactgttaaggaaaagggttaatagatgctttcttttttctcttgaatatagattaaagcactccacaaatatgattgcttgcgagccaataaatcgacctttgcctggggtctagaagccagagtaccatttttggacaaagagtttatcagagttgcaatgaacattgatcctgagtgtaaaatggtatggatacagaatattgcaatgcaccatcacttaaaaaatgttacattttattaaagtggtttactacgtaatctgttcagataaaaaaggaagaagggcgaattgagaaatgggcactgaggagggcctttgatgatgaagaacatccttatctgccaaaggtactatgtgatttgaagcattgtagaactttgcaaaattaatttgttaaactaacatgttagactttaatttttatgcagcacattttatataggcagaaagaacaattcagtgatggagttggctatggttggattgatggccttaaagctcatgctgagaaacatgtaaaacttgaatgaaaccttttctcgctaatctctttttttttttttttttttctcttgttatcaatggtcaggcatgacatttcatattgttaattattggtttatgaaaatttcctttaggtaactgacagaatgatgctcaatgctgccaacattttccccttcaacactccaaccaccaaagaagcataccactatagaatgatatttgagaggttcttccctcaggtaattttagtcaatcatacctagatatgaaaataattcatgtcgatttaacaagggctgatccaaatctctgtgccccttaatttggttttgtagaactcagcaaggctcactgttcctggaggaccaagtgttgcatgtagcacagcaaaagctgttgagtgggatgctgcttggtctaacaaccttgatccatcaggtagagcagcacttggagtgcatgcatcagcttatggaaaccaggtcaaagctgtagaaccagagaagatcatacccaagatggaagtttctccactaggagttgccatatagagcttgtatgagccatagcaaggactagtagttgccctagaaccagcatataatattattatactagtcatcataaaatgaaaattttgcttgctttgtagtttatccagggaatggtatataaatagataaggctctctatctagctgtcttaagtgttgtgccatccacatcttgtctttattttctatttatgtcacctgaacactatcataatgtactggatttccaagaaaatgttatcagttaaatttgaatgcatggttcactatttcaaattttcgttacctgtgtattaccaaaaattctaactagctgaactgaaagcatattattcatgccatacatttcaaaaaataaaaaggaaagtgacacagtaagtattatgatttatatgctaacttctacaaatgattgtagaacttcttattaaccttacaaaaaaggccaacacaaagaacgtatgttcaaaataggccttaatataggcagatattagggaatgattgattgataaagagactaaccaagcccactcaatagtacggaacacttctgacgtgtatctctcaaatttataattctgattagactgtttatagtgattttttttcgtgaaaaaatattaaccttttatttggtcgagggaaaagaaaatgaaatgagaaacaaacttaaaatttgaataaaaatcaaatgaagaaaaaattgaaaattattttattaattattttttctttctttgcttagtttttttttattccttcttatttgtttttctttgtgcaaatattggatacaagagcaatgattatagacataatttaaagtatctatccaaacataggatatgagagtaatggtgttgcaactaggttagtgctttctacatggtctgtgaggggtgccttggtatcaaatttcataattcgtgggtgctcattgttaacgtattgggggttacattacgatgttttgggtctggaatagtattatgtaccggttcctgctatttacacctctatttttcctaaatacaccccatgctcccttctactaaagaagttcacctcttttacttttgaaaaatatcttttcagaattacatataccaatttcaaaaatatatctccagaactatgattcatggttccagagatatactttcggaataagtatatattttttttaataaaatatcacttaagaattaagatggttgatgaaacaaatgataaatgcttatcttatattcatgtttgttagtcttatttttat

SEQ ID NO: 360 - DNA, 6117 bp, Glycine max
  source 1..6117: mol_type = genomic DNA
tataatattgaatatattacataacatatatggagaaagaaatagaggttatcttactccattaattctggtccctctctgaataagataagagacataataatattatcatcttatataatatatttcaatatgataatacagttattttatcttatttttttatatttttgtcatcaaaggtatccttatgattattcaaatatcagttggatcttataatttcatgtaagtaaatttaaagagaccgaatcaataaaaaaattaaaattatgttgcaaaattgaaaacgaacaatattttaaaaatcattttataaattttaataaatacgacaccaaattacaatctaaaataaaattaagatattataaaggagtaatattatcctaaaaataacataaatcttattaattatattctcatcagagtcataaagatgatttgggaagaggcataagcataagcgttggagtgatgataagaaggttataggttctaattcttgtactaatataacatactagtagtaattattaacgtttacttataaaaaaaaattaaattcccttcgtatgcatggtaagtatcattatttgcatggggccttaatgacacttgcacttgacgtcaaaatgtcaaatctaccatcaaatacacattcattattcaccgtgtaatgtgtacagatgtcttttgttccttctgcatggaaaaagtgtgacaccttgcattttcagtactcgtgctcatcgttaccagcaatatagtattttttttttttagtgaaccagcaatatatatagtatatcttatagaatattacatatactttaatacttaggtgaaaaaattcttaacttatatatatcatttaattacatcattaaaatgttaataaaatatagtcagtaagtaattaatcgtcaacacaattaagttgagaatagctatcattataaatacccatgatagctttggttgattttctcacaggtcacaggctttttctttttcttcttcttcttcttctttattttctcattttgccaaactaaaatagttgtgttggtagctttggcaaagatgttttcagcaggccataagatcaaagggacagtggtgttgatgcccaagaatgagttggaagttaaccctgatggctcagcagttgacaaccttaatgctttcttgggccgtagtgtctcccttcagctcattagtgctaccaaggctgatggttaattaatttcttcatcgtttcacttttttccatcatcatcatccacaatcatcactttctatattaaaaattaactttaatttctatatacgaaaagtaagtgtaaagagtttaaataatttttgtaaaatagtaatttctgattcaacgatagtatacacattttttacatttttaattcatagagggttttgttttctattagaaatatatcacgtagtaatacataaccaaagatatttatatagtttaaacttactcggtacgtacgtaacatagtattattattatgtgtgtatgatctgtttgtagcacatggaaaaggaaaagttggaaaggatacgttcttggaagggattaatacttcgttaccaactttgggagcaggagagtctgcattcaatattcattttgaatgggacggaagcatgggaatccccggtgcgttttacataaagaactacatgcaagttgagttcttcctcaagagtttgactcttgaagccatttcaaaccaaggaaccatccgctttgtttgcaactcatgggtttataacactaaactttacaaaagcgtgcgcattttctttgccaaccatgtaagctctttagcaattagtagtttaattacaaaagtgtgtgtgtgtgtgaaatgtctaatggcaagttcttcaagtttaagctaagaattaaaaaattcaatttaatgtaatgtagacatatgtacctagtgagacaccagcaccacttgtggagtacagagaagaagaattgaagagtttaagaggaaatggaacgggagagcgcaaggaatatgataggatctatgattatgatgtctacaatgatttgggcaacccagataagagtgaaaagttagctcgtccagttcttggagggtctagcacctttccctaccctcgtaggggaagaactggtcgaggtccaacagttacaggttagtcttctatggttctatataatttaaatgaattgtaacattgactttttataatgttatggtcagcgtagtacaacatattgcttgggtatatgtgacacgttataaattaattttgcactatgattctgattatttttattttttttggatgattaagtttttacacattgttgtttcctaatcaatttcaattcaacagacccgaatactgagaaacaaggcgaagtattttatgttccaagagatgaaaatttaggtcacttgaagtctaaggatgctcttgagattggaacaaaatctttatctcaaattgtccagccggcgttcgaatctgcgttcgatttgaaatccacgccaattgagtttcatagcttccaagatgtgcatgacttgtatgaaggtggaattaagcttcctagagatgtaattagcacaattatccccttaccagtgatcaaagaactctatcgtaccgatggtcaacacatcctcaagtttccacaacctcacgtcgttcaaggtgtgataaataaatataataaaccactcatacttgaaatcttgaattaatcaatgacataataaatataataaaccactgatacttgaaatcttgaattaattaatgacattttggtcatacaaatcgtatcgtattcacgaacaaattcaaaactcattatgttttttatgaaatggttattccatttaataaggattttctttttattattaatttgggtagtgagtcagtctgcatggatgactgatgaagaatttgctagagagatgattgctggtgtaaatccctgcgtaattcgtggtcttgaagtaagttcaaatatttatttataaaatcaaatttgatgtccacgtaaaattaggtagtatatcgccagtaataaactaaaatactaaatggttgttcttctttaattaaatggattgtaggagttccctccaaaaagtaatctggatcctgcaatctatggtgatcaaagcagtaagataacagcagattcccttgatctagatgggtacacaatggacgaggtaaacatgcgaagcgaaggaattgatacaataattttcctcttaaagtaattaattaaaactaattgaattttgtggtacaggcacttggtagtcgaaggttatttatgttagattaccatgatatcttcatgccatatgtgaggcagataaatcagctgaattctgccaagacttatgcgacaaggactatcctttttttgagagaagatggaactttaaagccagtggccatcgaattaagtttgccacattctgctggggatctgtcagctgccgtcagtcaagtcgtcttacctgctaaggaaggtgttgagagcacaatttggctactagccaaagcttatgtcatcgtaaatgactcttgctaccatcaactcatgagccattggtataaattttcattttcattttcattgctatatatcaacatatatagataaattcaatctctaatccctctctctcaagtgtatattaattacttttgatttcttcataggttaaatactcatgcggcgatggagccattcgtcatagcaacacaccgacatcttagcgtgcttcacccaatttacaagcttctgactcctcactatcgtaacaacatgaacatcaacgcacttgccaggcaatctctaattaatgctaatggcataatagagacaacctttttgccctcaaagtattctgtggagatgtcttcggcggtttataagaattgggttttcactgatcaagcactacctgcagatcttatcaagaggtaattaattaagtaaatctctctatatcactagaaaaaaaatgtgacataaaggtttgaaatatataggtatacattttgttacaaagcataatgatggatgcatgtatatattatattttgtttgacttagaggagtggcaattaaggatccatcaaccccacatggagttcgtcttctgatagaggactatccttatgccgctgatggactggagatatgggctgcaattaagacatgggttcaagaatatgtgcccttgtactatgcaagagatgatgatgtcaaaaatgattctgaactccaacattggtggaaagaagctgtagagaaaggccatggtgatttgaaagacaagcatggtggcctaagttgcagacacttgaagaccttgttgaagtttgcctcattatcatatggattgcttcagctctccatgcagccgttaattttggtcagtatccttatggaggtttgataatgaaccgcccaactgcttctagaaggttgcttcctgagaaaggcaccccagaatatgaagaaatgattaataaccatgaaaaggcttatttgagaacaattacatcaaagttgccgactctcattagcctttcagtgatagagatcttgtcgacacatgcttctgatgaggtctaccttggccagagggacaacccacattggacctctgattcaaaagcattacaagcctttcaaaagtttggaaacaagctcaaggaaattgaggaaaaacttgtgaggaggaacaatgatccgagtctgcagggcaatcgacttggcccggttcaactgccatacactttgctttatcctagcagtgaggaagggttaacttttaggggaattccaaatagcatctctatctaagggagcctgtggtttactctaattactctatatatagtgcatgtgtaccttccaataaaaaagatgcaagactagagatccgataaatcttgcatcttatctaatgtttcaattatcttgtgttttaattaatgttgtaattgagctcacagtttggttgtggtttgcaaataataagagcagtgagcactattagtttgtgtttagctcctgtcatcatgtttggtattatacattttgcagattacgtaacacaaatttatgttattagtaaaaaaactgtattgtacgaatattttgtattataagtatataagaaataaaaattattagtattagtaaaaaaactgtattaattctttgtagttcgtctcattagtttttgtatcttgttatatttgtttctccattgtttttatcatcactatctaatttatctgctacaaattacttttaagtcacaactcgattcacatgcatgggcgctgcaaaattagcacacagtaaaaatctatcaataagaaaaaaaataccttacacgtttggcatggaatttattttgcttttagagtgtgttatctacagagaagaaaacaatttatcacatattacaggtgaaaggcctaaggctttcaacttttaatgagcacgccaataaaaaaatatgatagatgtatccaaatattctcacagtatgatctgtttgaaagccacaaatttgtaacctttaatgaatggaagcctgaaagaagaacgaccacaaccgatgtcaacagatgaaatcgagaacgcaaaaaggacaggtgtgtaccatcttagttaaagaagacgagcaaaggcagcagtggatgtacttgatcaataagtaaagccctacaaggctcagagcagaactaccaacgactagaaaaagtaacatgtgttgtggtcatataacagcttgtggactagaatttcctatactgccctgacttggcaggaaaaatgatatcttggatacatggccaatgcaattttaaaaactaacccttgctgcaattgaaattgcgactcagataagatgatattttcttctagtttgcacttcacagcagcattgttaaaagttaaaacatgcatgattgcatttattattttggtttccattatactaacacaactctctttattaatgacaaatacaaatacattcagccactcca

SEQ ID NO: 361 - DNA, 8211 bp, Glycine max
  source 1..8211: mol_type = genomic DNA
aattattgttattaattttatgctatttattgaaaaaagttaaactatttatttggtatttgtaattattctcattttatattttagtcctatgaaaaaaatgtaagttgtagtctctacccacgaataaaagttttgttccttattacttaaacttgtagtacaaatatgttgcaaaaacttttcgacaatgataaattgtcactaaaatttacaatctcctcatgtaatcacatgaatttgactcgtaaaaagccatgaaattaaaatgaaaacagccataaagatcaagtgattttttttattaaatgacattaaaaatttggtaaaaaaaatgacattgtaaatatgtattatttattctaactctgtgacttatgtgtaccaatttgagtaattatttatgtaagagacaaggagtcctttgtttgtttttattccttttgtattaaaataatttatattttcaatagacttatttctccaaatatttaagtatccaaaacttaaactcgaaataactatctaagttaacaagtcgtttagtcatcactgataatgataaaataaaacatgataacataaatataaaaaattacattttatttaaatagttacttttcataaattataaaaaaattgtataagatttttaaaattataattattattcaaatattttttctttaagaaaatatgaagagacatattccaaattgcagtaattcattgatgaagtccaaggaataatgaattgctagaattttacactgatcatatatataaaaattaacgttccttcaggaacatccgataaaattggaacggtatataaaaattaacctcaaataatattaaaggccataaaattataattttaattaagaaaataccagaaaaaaaatatgcaagtgttttgtggttatgaaaggatgggtatagaattgtggagtggattctacaaaacggacaaaatgtgcatttaaacgaattagtatagaaaacaaataatgcaactgccacccaaaccgtgagtgcaaaatctaccaatctcaaacagtgcaaaaacactgcgaaatattttcaaccgcaaaacaaataacattcaatttccaaaattgccataatcaaccatagctgaacagaagaagtcagtaaccatcgtcgtgagcgaagatccataataatacagttacaaattgcaataacacactcattgtggttatcgaaatttgatcgcagcgtcgagaagaatgggaagtttgggagcgattctgaaacatccagatgacttttaccctctgctgaagctgaaaatggcggcgaggaacgccgagaagcagatcccgccggagccgcactgggcgttctgctacacaatgctccacaaggtttctcgaagtttcgccctcgtcattcagcaactcggcaccgagcttcgcaacgccgttagtccctcgcatttcccgttctgcctacaccgttctttccttatgctttcgattccacgtttttcttaattgacctctgtttttttttttttttttgcaggtttgcatattttatttggttctgcgagctctcgacaccgttggtttgtattcgtatcttcgatttaaagccttgcgcgctttgttactttgtgctgcatagcttgcgatgatgaatgatggatatcggttttaattaactacgctgtgttgaccagtggtttttcggtgtttaattttgacttctttatttatttgttgttttttaagcgttgaatgttgctgtgtagggattgatgttatcgtcgtacggctttgggaaataaaagtgattttaagcttcagctctttgaaaaagcttttgaaaatgaaattcaatagaaaagcagtaacacgagtttttttttttcttgttctaaaaaacataattattatggaaggcatgcaaaattggcttacactgaaactattccaagtctctataaatctgctggttattgtgtctattgtctttgaaagatttatgtttaaaccttaaaattattctattgagcaactattcttttcttcagaaattaaaaggctatttatattgttgtaatttttttttccttttgacagaggatgatactagcatagaaacagatgtcaaggtgccaatactgatagcctttcaccgtcatatttatgatcgtgattggcacttttcatgtgagtgtgtcattcttttttgcttttctttttttaaataatttcttgccaagataataagattcaatacaatttgaataaacttcttcaatctgttgtttttttagttgtaagtattcaatctaaccacatctagcttgtttttcagaaattggattggattttaaactacatactcatagcaattgcttgatgctgatctgcacactaattgtttctaatgtgactaggtggcacaaaggagtacaaagttctaatggaccagtttcatcatgtttcaactgcttttctggaacttggaaagaagtcagtttttatccttgcacatttacctaaattgaactttaatattctgtaccatatatggtctcaagttgctgtttgtttccatccttgatccaatcagcagcagccatttgggttttattattattgcttattaatcttggggaagaggagagggaggggggtgtactgtttatcattaagacatgttactaatatcattttgtgagattcaatttgttatccctttctgtctggaatattaaaatttggatacgggattgtagtggcatgttgttggtgtggaggttgtcaacgtcatgcaccttttaatgtaattatttattatgttgataattgactgcagattatcaataactatggtcctttgtgtttgtgatggctgtgcattctataacaaaaaattaaatgttggtcaatgatttttgcagctaccaggaagcaattgaggacattaccaaaagaatgggtgctggaatggccaaatttatttgcaaggaggtttgtcgcacatggcttctgttctccatatattcttttcattaacttagttgtagttaataaacctctgtgactgacaagagattatatagagttcgttattcgtttaaatgatgtctccatcttctagtttctggtctctattgtttttttaaatgatttttcttgcttcagactatcttattcaggtagatgaaaatttaggaagaaggggcaatataatgaagagaaaacaaatagtttagtagttttatttcaaccaacaattccttaatcatttgatgttatattattattattatcagtgcatctctcctaaattcttatttacagagcactatgctgcgaagggatttctgcattgtcttgatttatgacaagagttttttttttgcaggtagaaacaattgatgactatgatgaatattgtcactatgtggcgggacttgttgggctgggtttatcaaagcttttccatgcgtctggttcagaagatctggctccagatgacctttccaattcaatgggcttgtttctacaggtatcatatcgtggtagtaagtaataaaaaatacagtatggttgcaattgtttacttacatttcaggtcaccctttgagattgcagaaaacaaacattattcgagattatctggaagacatcaatgagatccccaagtcacgcatgttttggccacgacagatttggagtgaatatgttaacaaacttgaggtttgactctatacgataggaatttatatttaacctcattttgttatgaagttagaaaatcaattcctgcattttccaatgaaaaatacacgtcccaaggcaaataattaaacagttgtgtgacaatattcaacagttttgttcagattaatttaagcatacagttcaattgtattcaacagtttaaaatcaattctattaaaggggtacttactctaacataaataattctttcacctctttctcccccatttcattaatctcacactaatttcttatcatttgaatatttgatggtgtgatagtgaaacctgtcacactttttttacacacatgaatactttttaattttttgtgtccaggatttgaaatatgaggagaactctgttaaggcagtgcaatgcttaaatgacatggtcactaatgctctgatgcatgctgaagattgcttaaaatacatggctgctttacgtgacccgcctatatttcgcttttgtgctataccccaggtgctgttcttttaattacttctgattatactgttattatgttcatttcaatcgtcttgcaatgatataccatcatttatctgcattttttattgtttgcatatcatgttatgttacagtagagttgaatcattggcagcttcctattcagttcaaataataataataaaaaattactatgttctgtcagtttctttaaagtttagtttaacactgcccaaaagatgtgtgaaaataacacacttttatacaaatctttataaagtgctttgcagaaacatagtggtaaaccttgagacaggatatttttaattgtaatttcatgtacaataaatgcaagagtagatcttcttcctatggttgagcaattttctagattattagtgtctgaaggtttagctaaataaccttgctgattttagttaatattacctggaataagaaaaattttctttcgagctgcagatgttctagaggaagaagttgcatgggtcttgggcctacaatttacatttaaagaagttaaagtaccttgtggtggatttaatagtttcaatctgatgtggaaacaattttttttctttatacatcacagttgttttgtgggggtggggttagttctagctcatattcattttatgtttaatgatttatgtatatagcaatagttattttcataattttttcccagtaactttgatgtttatttgacatatgcggtgacagataatggcaattggaacacttgcattatgctacaacaacattgaggtcttcagaggtgtagttaaaatgaggcgaggtaacagcaaatattctgataataatttccttgtgatttgattttgaggcatgctaaacataaagtcaaaattggtataagtcacggcatatgtgtctttgaagtcctaggaatagtgaattgctgcaatttggatttcatgttttttttggcacagcatttgtatttcatgcttgaatcaatctctttaaaattacctttgaatctgtttgttattatggaatccacatatgcattagtgtcaaacataacttttgtatgggcccaacacgaagtcattgagcatattccatgagattctgtgattgtatcttggatgttcaaatatcaaatctaaataaatactttgcaactattactaccccacatcttctgtagcattctcctcttatggatgttggttaagtactgaatggcagtttgaacttaggaagagtggccgatggcatatacttttgagttaagaggccagcagatgcaattctatgatggatatcccttgttttgaagtgaactgataataccttaacctagatatatatgactagctgagtcatttgaacaatttcctttcctcccattttgtttgacaaaatattgttttttttttctgggaataaaaaaggatcaacatgtagctattggtgttcatgtttgttgtctgctgttactctgtgtgtgtgttgtgtgtaaatattaaactagctgttatttctgccttttgttttcacttttcaatttataggtttaactgccaaagtgattgaccgaacaaagactatggctgatgtctacggtgctttttttgattttgcttctatgttggagcccaaggtatgaatctgttgttgtccttaacacggtatgattaggttttcaactgaagaatgtgagtgctactcatgttgcattttacattggataaagttcctaattcctattgaatgtttataacagcaaacacattaattttacattggataatgttggtacttcctactcattccattgtcctaaaggaaaagatatttttgagtatccaaaattttaaaatgtagatcttgttgcagtttttcttttccctttagttgtagtacattccatccaccatggaactaaagcagtttttcagtttcaagagtatcttttaaaagctgacttttcccaactaaaaagattcagtattttcctttgtaggttgacaaaaacgatcccaatgcaacaaaaacattgagcaggctggaagctatacagaaaacttgcagagaatctggtctcttaagtaaaaggtatgcacataactgagtagcttcaaaagtactttatctttttatcattgacagtctaacaaccctttcattgatttaagcaggaaatcttacattgtgaatgatgaaagtggatatggctcaaccatggtacgtttttgttgttttttttttttggctgaaattagtctttgttgtctagtaatagtgttaaccaatgacgcaacagtgacaagggcagccacatgtaaattttttttgttaaactgtgtttttaaaatcattatctgtgcaaaacagttgatgagagatttaaaaacacaatttatataaaataaataaattatacatgactgttatgctattacatcattttaactagatgctgcatttctgacttctaagaatatgcactgacgtaaactatccttgcagattgtcatattggtcatcatggtttccatcatttttgcttatctgtctgctaaccaccataatagctagtgtaagttctgttgttaattttaatgtacggttgaaattgtaagaacaattatccttatctataaaattgttcactcctttttttgttgcaactaaccatgccttcttgccttttgcgatcatggatagtagtgaaacactgatagcacgcctcgttcatggaatgcgaatttgcatgcatgcaagcaatagtatgatggctgcagttgactatcgtgtattttaattgaaaaatagtcgaatatagcgtcaagagcttcttgtgttagtttggatttaactctatcctacgttcatcccgaaaattatcattattatgtgtgttataagttgattgtattaacatttcacggataaagttggaataccagatgagtggtaccagtgatgccccctccccttttttccccgctttgttcaagttctttagcgtggcatgccaaaatcattcacaagaaggaatcaagaaaggttaaagaggacggaaagagacaaagaagttaaggtttttaatctgataatatacacaggaaattattgggatcgacatttgtccttgaaaattcataatcgtcgaatgtacacaatccatccattgtgatacaaccgttgaatcacaggtttttaaaaaatactattaaatgccaattactggtccagcttcgatgaccattttaaaatgggtataaattagtattactttgagcatttacaataagagtttcttaatggattacttaataaaaataattattattcatgagttgtttaattttatattaaatataggagagaaaaataaaatatttaaataatttgttaatagaaatacgtattggagaaaaaattgagttacttaatattgaatattaaggttatatcaattaagttgcttatatcaacatcaatgtattaatatttgaattgaagacatcgattaaatattcttttcacttaacagtgtcatatttatgcttcgaactcttcatattttatacaaatgttagtttgtaattcaacatatttttttgataatttaatgtgaatccaaaatcacatcaaaatgctcttaccaactaatataatttttggtaaatgttcatatatttgagttaaaacaattgattgtagtttattaattgagttaaaacaattttaagtaactttttaatctaaaattgattgacttaaaacaattttaagcagcttttaattgaataaaaaatttatattgaattttactactaacttttacaataaataaaaattcaaatatcaataatttcacttgaaaatcattttacaaacgatcacccgaacataagttagttggttgaagttgcataaacaaactacgaaagaaacaagttgagtgcaataaaataaaa

SEQ ID NO: 362 - DNA, 4389 bp, Glycine max
  source 1..4389: mol_type = genomic DNA
tttttcaggatcacgtattataattttatggactaatttgactatctatctataaaaaatatagtacatggaaagaagccgatcatccatttgcatttcaagaattgcgaggaataatctagaaaataaagtacaactgattaaaaaccgggataaaattaagtatgtgtatattaaattttgaaattaattttaaaattaatcatcaactttttaacagtttaattatgtaaaagtttgatactatatagcaattaataagaaactatcattgatatagtacatgtttacaaaattactcctgtaccgtacgatggagcattgccttcacactctcaattcgtgacccggtaacaaattagaaactattgctatatatgctccaataatctgtccacttatcaagaaataagagtcattattaatacagatataaagaaacaatagtataaaatagtaaccctttaaaattacttttggagaattgtttactcctagttattatcttaaaaaaattgaatcatataattatatattaagttttgaatatgtgtttccatcttatagtttatgagattaccatgtgtttaacagattgggatctacaaactttaaaagtaagcagtagatacataatagttttataggcctggttggttagctgaaatttacagctactacgcggataatgaaccccaatgatgaaaacatgcagacgcatgttgcagcatggaagtattttatttaataagaataataataaggtaagtggtagtaattaaattccatattcagtatcatgggaaatgagattctttgcctttgggatacaccattaggcttttagccgttccactgtgtatatgcggcgaaatgcattactccatggcccttgggaatccacttgcctcctatcagactcttacgtagtcaacgccttcgcctactataaaaacacatgcactaccacactccttccttataccattcactacaccaacacactttcttccttaattttctagctcttgctacgtacttgaattcaattagttattaatggctgagattgagggttctcccggaagctccatgcatggagtaacaggaagagaacaaacatttgtagcctcagttgcttctccaattgtccctacagacaccacagccaaatttgctctcccagtggattcagaacacaaggccaaggttttcaaactcttctccctggccaatccccacatgagaaccttccacctttcttggatctccttcttcacctgcttcgtctcgacattcgcagcagcacctcttgtgcccatcatccgcgacaaccttaacctcaccaaaagcgacattggaaacgccggggttgcttctgtctccggaagcatcttctcaaggctcgcaatgggtgcagtctgtgacatgttgggtccacgctatggctgcgccttcctcatcatgctttcggcccctacggtgttctgcatgtcctttgtgaaagatgctgcggggtacatagcggttcggttcttgattgggttctcgttggcgacgtttgtgtcgtgccagtactggatgagcacgatgttcaacagtaagattatagggcttgcgaatgggactgctgcggggtgggggaacatgggtggtggagccactcagctcataatgcctttggtgtatgagcttatcagaagagctggggctactcccttcactgcttggaggattgccttctttgttccgggtttcatgcatgtcatcatggggattcttgtcctcactctaggccaggacttgcctgatggaaacctcggggccttgcggaagaagggtgatgtagctaaagacaagttttccaaggttagtcatctcttattctttatctatatattaattctttcagaacatagataatatgtttgaaaaaaatttatgtaatcatgttataaaataattttatcctatcatttaatcaccatatatatatatatatatatatcatttttgatgaattaattgactttttacaataaatatcttaaaaatcatattaataatgatttttaattaaaaaatagtttaaaatgaatttattttattagtatgattactgaattctaatatgtgagtgattgaatgatatttacagtatgagtcttatttatatgtttgacttttccattagtggtgaattttagtggagaaaacaaatcttaaactatgtaacggatttcacttttttgttcaggtgctatggtatgccataacaaattacaggacatggatttttgctctcctctatgggtactccatgggagttgaattaacaactgacaatgtcattgctgagtatttctatgacaggttagttcagctcaaaggcatcacaattatttgcatatatcacaattgcattaatttaataactctattactacacattggtgtttttaaccttacataatgagttaattgatacaaaacagatttaatctcaagctacacactgctggaatcattgctgcttcatttggaatggcaaacttagttgctcgaccttttggtggatatgcttcagatgttgcagccaggctgtttggcatgaggggaagactctggaccctttggatcctccaaaccttaggaggggttttctgtatttggcttggccgtgccaattctcttcctattgctgtattggccatgatcctgttctctataggagctcaagctgcatgtggtgcaacttttggcatcattcctttcatctcaagaaggtctttggggatcatatcaggtctaactggtgcaggtggaaactttgggtctggcctcacccaattggtcttcttttcaacctccaaattctctactgccacaggtctctccttgatgggtgtaatgatagtggcttgcactctaccagtgagtgttgttcacttcccacagtggggtagcatgtttctaccaccctcaaaagatgtcagcaaatccactgaagaattctattacacctctgaatggaatgaggaagagaagcagaagggtttgcaccagcaaagtctcaaatttgctgagaatagccgatctgagagaggaaagcgagtggcttcagcaccaacacctccaaatgcaactcccactcatgtctagccatagcacttcaatcaaagaagatcatgaaacataattactgagcagtattgggaatgaagaaccatgagtgaagaattttctaataagaaatcttgtaacatgtagacatagaatgttctggttctggtttgcgtgtggtgtaagagttgtctacttgtggtaagtcataagtatcataatcagtatgtcaatgcagatcttgatgctgagtatcaatagtatcagtttagttaatttgatttaaaatcaattttaccattgctggttgtgtttaattatccagtaattaggaccttttatttgactttctggcttactatatggttgtctacttgtggcaagtcataagtatcataatcagaatgttctggtttgtatattctgtacttgaaatggaatcagaaatgaaattgatattgtactctttgcaagttgcaactcaattattgttgagttttttttaagagaaattgacctgtctcatttcgtgaagcatagaacataccaagaagtatataataatctgataaacgaccaagcagatactaacgcaaggtaatgccaaaaattagatgaattaaataattttaaattctcttacaacatgttatcatatcatatgaatttacctggttttggttccgtgtggattgcgaaacagaactataacatagatattatatatttattcacgtaaggagtgactcatctttcgcgttggctcaggaaaaaagaatggtggccaactaaccattgtgttgtttgctatacgctacttcctgtttcattcaatttcccaagttttttggacggcaaaaacaactacgcttttgacggtgttgagaggaagacattacaagtagaaattgtgggctactacgtcaccagatgcattattctcagatttttatatttcttttaatctcttacttttttcactgtatcattcctcacatttttttatatatatttatctctgccttctatcaatcttacatataaaagattatgtgagataaacactgttgtttttatttaaatagaaaagacaaacacatttgcagaccaacaagtgatcagtttgaatggagtatgactcaagttctgattttgtgaataaaaaaaataaaatgtcacaaaaaaatgaccagttaaattctcctatatggagattatttatttattaaacttgtaaatgcattacaccaagtcactactaaattg

SEQ ID NO: 363 - DNA, 6338 bp, Glycine max
  source 1..6338: mol_type = genomic DNA
aaataatctaatatgataatttaaattatttattattaattttatcctatgtaatgaatgtattaaaataatgtaattataaagctaaaattgaaatcttttaaataaatgcttagtattaagtcttgtaaataaaaaatataattaaaaaattataataaaaataatcagttaaatttttgacaaaaataaaattaacaaattcaataaatattcaaccatttacacctgtattattgcaaaaagaaaagaagaaaaaaaaaacactgaatccaacgtgtcagttacccggtgaatgagtattaatggacccaccatcgtagattcttctcccaaacaattccaaacacatttttgaaacgcagctgccaattgaaaaatttattatattatttaacaattccacctaatatcatggttattcttgtgatttaatttttataacttattatgaaaaaacaaagcattaaatgttatccgttgattgtaacagtaagacttcaatgattatgtacggaaaaatgattttatattataagttaattaaaaattatatttattttaattttgacataattattataaaaattaataaattattttatatgaaagatttgtaataaatgattatataaaattattttatattattaatatataatttttttattaaaattaaagtcaacatatttatgatgaattatttagaatgattggtaagatattttatgatgtgaatgtataattttttttatctcgttgttttctaaattgtcctttatttattatattttaattgtttttcaaaatccattattttaattcgcatttggattttgtcattttttttaacaaataaaaaatatttgacttattattattgagttactaaaggaagaaaacattaaaataagttaatattcaatatagaaatgatttgattggaaaaaaaaaaaactattggtatagtcaattacgtattgaatctgaggagtagaatttggtagggagagaacaaacccactataaaatgcccacacccctgcctcgctgttctcacatcttcttttacgtattgaatctcagaattctctaaaagagatctttttctgctctttgaagaaagaagggtctttgcttgattttggagatgtctctgctctcagatctcatcaaccttaacctctccgataccaccgagaaggtgatcgcagagtacatatggttagtctcttttctctctctgtttctctctgtctcacaaagtttttttttggttctgtacgaacaccaacataacaacctgggaaaatgtttatgtttgtgtctgttagtgtgtacatggtttttttacgtgtgcaggaacttttttttttctgggatgaaaaaaaatgcttttttttcttctcatgttgggtgtggtttatttttactaatcttttatttgatcactgacactaagttgggtctaacggaagacattagtctgtttctctcgttacatgaacagatcaaagtttccaatttttctgatggaaaaatgctgaagttttagtctttcccacttgagaggaaccaaagaaataaaatttttatttgatccatcactccactctactctattctactacttgcttttgttccaccccttttaaaatgaccctagagaagtttgatctctgagttctgaattcatgatatatctcattaacttgagtattgcaggaattgaaattactttttcttctatgatttcccctgtttttttcttttcttttttgcgggtgttccattttttgtgtgtttatgagatgtattttattctctctcgatttctcagcctcctttttgattttttttggggtcgttccgcttttgaagtgttaaatctataagaatgtttcctctgttttgactttgtcttttggtggttatgctatttgatcacttcaaagatgagtttgcttggaattaatttgagaaaggaagattctttttccatgtttctttcttgttgcttgttacttagtttcttgcttttataaaatacaacctaaattattcttcatgctcactatcaaatgaaagcaacttgttagaccatattttttcggataaaatttttcccttttgatgcattctaacatttttattattcaccatggtaggatcggtggatcaggaatggacctgaggagcaaagcaagggtaattcactttttttttttgtagcaaactataaaaataaaataagttcattcgtttttctgtttaactaatgcaagtgtaaaaattttcttggcatatagactctcccaggaccagttagcgacccttcagagcttcccaagtggaactatgatggttccagcacaggtcaagctcctggtgaagacagtgaagtgattttatagtatggtttttttaatcctatctaatcactatatctcccccttaaatacaaatttgtatttttttctttccattttatttatattccattatttacttatatgggattgattcaatacagcccacaagccattttcagggatccattcagaaggggtaacaatatcttggtgagtttggttttttgcttttacaactttgttttcctaaaaagtttacaatactcacaccactgagctagatccccttgttttttttttttttgtttatacacttacaatgtgtaaagattacaccaacatgatttttaaagtaattattataaaaatcaacaattaaattatttatattggttaaaaaaaatctttgatgcctacaactttgatttattctaggttatctgtgatgcctacactcctgctggagaacctattcccactaacaagaggcacgctgctgccaaggttttcagccatcctgatgttgttgctgaagtgccatggtatctattgttgtttcattgctgtttgaaataacattttctcactagttttcatttctctgaccaattggtgcatggttttttattaggtacggtattgaacaagaatacaccttgttgcagaaagatatccaatggcctcttgggtggcctgttggtggtttccctggacctcaggtgaatactaactttcattaatgttttaatttttagggttgttactttacacatatgaagctcatatattgtccatttgactcatttaactcaaattatcaatttttacacttattgggactcttatagagacaatgattataatcccttagcaatatcaaaactttgtctttaaccctacttctataaagtttgttggaacccaatttaagcttgcctttgagtgtcttttattgaaaaaatcatattgtttacttattactattagcttatagtacagctgttctacattttatatttaggaacaacattgttgttttgtttgttccaacagggtccatactactgtggtgttggcgctgacaaggcttttggccgtgacattgttgacgcacactacaaagcctgtatttatgctggcatcaacatcagtggaattaatggagaagtgatgcccggtcaggtaatttggaaagaaaaataatattatgcacttattttcgttctaatcgttgattacccttttagtattttcatttattgtttggtgcaaaatatatttcaattaaatctcatctatgattttgtataatacactataacttgcttttttataaaaaaaaaaagaatgaagatagtattaaatttaattcaatgtgtatgtagtgggaattccaagttggaccttcagttggaatctcagctggtgatgagatttgggcagctcgttacatcttggaggtaggtagcacatgatgacttactagtgttaatgtacctatcttaacattgcaactaacattctttgtttttctatggtaacaaacagaggatcactgagattgctggtgtggtggtttcctttgaccccaagccaattaaggttattttttttttctctctcaagttttctcccctttatggtaaagttattttcccatcacatttgttccaaccccatgaaaaaacataggtattttaggcattttatttgttcaaatgatgttgactattgttgtttgggtcattacaaaattagggtgattggaatggtgctggtgctcacacaaactacaggtaaccttttttcacttgaccaaaaggactaaactaagataaattctctttgcttttcatgcttgaccagtgcatactattaatataatgttgcagcaccaagtccatgagagaagatggtggctatgaagtgatcaaagcagcaattgacaagttggggaagaagcacaaggagcacattgctgcttatggagaaggcaacgaacgtcgtttgacaggacgccacgaaaccgctgacatcaacaccttcttatgggtaagaaacaaaaataaaaatgaccaaacccataccatgttcctttgaactaactttaacttgacacattttttccatgtgagaccaaacattatggaccctttgtacctaaacaaaaactttaggggaccctttgagaagatatttcttttttttgtttgttttcattttaactttcaaaattgttactttcttttaattgcaccatgattggtaacattgcggcttgaactcaaccgtaattttctgaagtaatgcgttgatctcactgtgattttctcctcaacgtggatttttactaccaatccagacacagccaccacttaattttctgcgtcattttttgtaattaagattgaaaataaaaagaatattttcatgtaccaaattgtcacaagttttctcattgtttagacttgagaccaagttataataaggtgtttatattatttgatttgattattgtttagggagttgcaaaccgtggagcttctgttagggttgggagagacacagagaaagcagggaagggatattttgaggacagaaggccagcttccaacatggacccatacgtggttacttccatgattgcagacacaaccattctgtggaagccatgagcaaaacctgcatgttttctccctttggatggaaaggaacagttatgcttttcttagtaggatttggtctctctctctttttaccttttgattggtactatggttggtgccttgttggttggtgcaactaactggcaagggttgttcattgttttcttctattcctttccctcgttttccgattgttacaatgacaataatttaatggttattatcagtcttgaacaaagaaatgctgattgtgaagtataataataatatatgaaattgtcatgttcattggagtaggaatttgtttctgttgctggatttgtctcgtggtataatttgatttgtgaactgatttacagttcagagattacgagataaataagattacggctgagagattacgttataaagaataataaatgaaaaattaggtaaaatgtattttttaaaaaagataaatgataattaattatgataaaaaaattagccaaaattacatttttcatcttccgggttcggatttggtgattgagaaggatcaaatttacaatttttttaaaaatgtaacatgtttttccgtcctttaaatctctgcctaaataatatttttttagtgcttaaagtatcatttaaaacattggacaaaaaacgctattaagaataaaacaaaaacatttataaagaagataaaattataaggattaaaaatatatttaaaatataattataggcttaaatatattttaataataaaatagtgggtgaaattctcttgttacttgttataataaatcttgttagaaatactaacttgggactatcaagttagactgagaaaactttcttccaacctggcttattgggctgaattgacctaaactaagtaaggtccgaaacatattctaaaatattaaaaaaataattagtttaagaaatactttactctttgaagttattttgatgacactaacacaaacaatgtattactgggagtccaacaacaacttaccaagccaaataaaagaataattggttaatattttttggtgaatgagaataattagttaaattattccttaaaagatacaaagtcactatattaaataaatttagtcggtttttttttccaaaaataattatcataattttcaaagtaaatagttgctataatatatatatatatatatatatatatatatatatatatatatatatatatatatatatatttaaaatttgaggaacaaatttgtcaatataaaaatcttaattacatttggaaaaaaagtaaaattaaaaa

SEQ ID NO: 364 - DNA, 7684 bp, Glycine max
  source 1..7684: mol_type = genomic DNA
taagagaaacaaaattacaatttaacattccatatcttttatgtttctttgccatatatactagcataaagtactaggatcatgcatttcctaatcaacctcgtcaatagattggcccgttctcaggaaaaaaaaaatcctctctatcaaacagttattccattccgttttaggttcctttttttctcaaaaactcgtgactattcctttctaggagttcaacgtctaaaatattttatacaatgagatgttataaaatgtgttaaattgttatcttttaaatatatttcttttgtttgcacgtatttctttctttaaagaaaatttcattccaaacatgacctggcactagaataaaacaccctttttagcatagattcaaacttcaattcactatattataataagagagtagttcctcccattaaattcaatctccattaataacattgatcttttatatacaatgactattgtttttattgtttaacttttctttcattttattatataagtattcacatgagataattattataattattttatgccaccaagcttttttttttaatgtttaatacaattatatatttaaaactccaactcaagattattatttaaaataaaataattccgtgttgattaattcatttgctcaatagtttcattttatcatttaaatgcaattataaatattttcctttttgtttttttttttgaagaattttcctttttgtttagaattacaataatttctatttaacatttgctatatttgttctgtcaaaaaatatttgctatatttgaatgaaacaattttttttctcaagcgataggaaactactgaatgtctagttaagaattaagaatttaagatagaatcacattgaatatttattaactttctttaacaatttaaaagatttatatatatatattttagtggagacaatagattcgttgtgatcatgtactagcgaataatttctggtattgtgataaaaataaataaataaataaattctggcatcgacacgtaaaggagactccactcacagaaagacagcacacaattcctttcccaccatgttcattattcccattgtctacgtttactgtttataactgaatctaagacaacataaatttaacatcgtgtttctcgttttgatcttgttcctgtggttagagtttagaatttgaagtagtagctgcattccatttttctccccttggaagcacgaggtaccctttattgtttgaactgtcttcttagtgtttgatgaaatgctgaaccagatttttcaggtgaaacagatggcattgactttgaaagaggaagacgcagctgactgggtttacagaggggaaggagcagttaatcttgtgctcgcttacgctggatcctcaccttcttttgtgtgttttttggtttctttccgttgcttgttgtagctgaattgtgtgcttatatgattttttttttccaagcttaatgtgtattgtgtgtgtagattgggaaagtggtccgcatacgtaaggctccaaggaatggatcgcagtcaaagagtgtgagtgtgaggaatagcatagctttgactccacatgaacgtgttctctggaaagatgtgcatcaacttatctcctcttcagacaaggaaatagttggtcaactatatgtgcagcatgttatgaagcctttgcttggttccaactctgttgatgctggggtatgtatgtatgtatgtatgtatgcatgcatgcatgtatgtatgtcagtgactgttgcattgtccctcttctagaatttttcgtcagaaacccataaacggaagttgttttattgactgaaagtggttgtttttattatcatgtgttgaagatcagttttgttattgataaaaatgggtttagtgaattgctgtgatttttggaatgaagtggttaagatgttgcgtgagaaagtaagtgattgtgattgtgattgtgatcattgacctatgcctccttggtatttgttagatgcacgtcctggtgaccagggaattccttgagttggttgagaagaatgtttctggtcaacgtcctgcgtggcgagttgaagctgccagggttgatgcacattgtgattttggccttctcatgtcagatcattctctctttgcttatggtaatgtgatgtgtaacactgaacttgcttctactgtttaacatttttctgtttttccttttaaattaaatatatctaagttttagcactgtgtcataaatagctgagatatcatcatttgccagtatgaggagttagtacataaacttgtcaaatgtttgaaggttctgtattaagctttatgtttcatttcaggcagtcaaggatctagcctctgcttatctgttgagataaaggtattgcctgcattatgtcacacactgttattttttggtttattttctctccttaaagaatacttcagtttaaattgaatatctttatctcagcttcacccctttcctctcagtctttctctttcgcttggttgtaacaataacttttattttaccttgaaaagtagcccaaatgcggatttcttcctctttcaagattcatatctgaagtaaatgctatcaaaaggagaataacccgatttgaaatgcaccaaactctgaaattgcttcaaggagaggtacatcctacaaaatttaaccttttatggtgatctagtggctgcatagtgcatacttcctgttgtcatatgttctaggctcagcatttaattctctgtcttatgattgatgttgtaatagtcaatgtccattatttatttggcattaaatctgagttagaaattctttgaatatgtttgtagatatcgcaactaagtgagtacaatccacttgatctgttctctggatccaaggaaagaattctgaaagctattaaaggtctccttacaactcctcaaaacaattttcgtgtatttttgaatggctctctcatacttggaggactgggaggtgttgcaaaaaatacagatgtttgtattgctaaagcatttgaagatgaacttaagtcaatcattcgagctgatgatgatctatgtacaaataacttatctactcttgttactgaggctttgcaaaaatcaggagtccttgataagctcctgaaggtgcagaagcttgataatattgacatagaaggggtcatccatgcatattataacattacttctcaacagtgcatggtgtgtaaggaattgagtgaagaacaggcaaaaatatatacccctttgcattcagcttcactggatgaaagtttgagaattgtaaaggactacctgatagcaacaactgcaaaagactgcagtttgatgttgtgttttagaccaaggaatgaggaggattctggatctgtgtacgataatgtatatctggactcaacggagcaatcctttgattataaggtaggcagaacatcactgttattattattggttgaaatttttggtttatagtgtttgcatgaatctgttcagttcattttaatgttgatttaaggccttgcttggggatgctgcagctttttcaaaaactgttgtcctgtaggtgctataaacagctacttctaactgtcactcagaatttgtttggtgaaagatataatatgatgtgaattcaccttaatcaataatgggtttggtagaagttattgtaccactgctccaagtatttaaagttactaaaaacaggtgttataaaatttaatgggtgcaaggtcaaattaggaaaagataaaatgtttctaggtatttcatactttttcagtcacagcagctttgaagagcatccccattgtagtacttctcaaaaaagacaagggacttttaaaagaaacaatcaaacaatatttatcagacataatttatgatttatgccgtaggttgcaattcttaaagatgctattctttttatctttatccagaaaaatgagtttcagctgtaatggttatgcactgaatatcttagtttgtttgcaatttgatctatattaggtgtattttatcgaccttgatttaaagcgcttaagtaaagtggaagactactatgaattagataagaagatagtgaactgctacagacaaatcatcaaaatggatcaaggaagaaatgaagagacaggcttgaaggcatctaatgctgcatattgagatttaataggttcgatagtgttcttttcttacttcatgagtatgttggggctgtcagattcccctgtttacgtgtttgtgcttgtatttttattatttttcctggttcatctagtatttgttgcctcctgaaatatgatatcttatgaaaataacttttttttgcaaaacatatttagtgttagtattctgcatggggtgcgttggtttgagaagcttgtttgttattatgataaattctctcatcactgtttataatgtagtctgtagatatgtggcccacgacaagtctcaaggacagatgtcaatttcacagttttttgtcggctaacgcttttggttcaatcagccgggaaaggataacatcgattggatttaaaaaattttgagactaaattacgatgttcatgttaactataatcatatttaactgattttataataactagaccagtgaacatgctctgcacgggcaacactgtttgttacagaaaatttaaccataaatatacttcgacctagagtatatttagtttcacctaggtcggagcatcttctcctcagcctcgattaggatatttttggtttgaccacggccaaggcctaaaacatcttcatcttcaactttggtcttggattaaaaatcaaaaccagttatataatcagttttggatatgtaactgattatatagccagttttttaaaattcaaaacaagctttacacagataccaaactcggttatgaaaaataagttatgattatggttatgaaatccaactttcatatgattacagttaggttattcaaataacctgacccatgaacacccataccactcaaggcgcatgtggtctttgtattgaacaccttttcaaaattccataattagactaattctagacagttctctcactcaaactcgacaccaaaatttagaaccaagttctgattaccaaaatggctcaaagaactcaagaaaaagaagagaacactctcaaatatatatataaaaaagttaaaacaaggagaaactctatttatactaattctacatagctattctggtccaaaaattagagaaaattatacaagaataaattgattaaagaaattataaaaacatttccttcactggtacttaatagaaattttgttgtacattcttatcttaaaaaagtgttgacagcacaattgaaaagctgccatgaactagaagttaattcaaaccgtgtctactaaagaggtttaattttcctttctttcaataaagactcaggagtcaagacacatactagaaatatatatctcaagctcaagtagaagaaaaggtacctaaagtagtagatgctttttgtatgcatttagttcacttgggagcgcataatagttgacaagacattaacttaaattccgaccagcatttatcaccagttacccacaactaccagcactgacacagtgacactccattaactcttcaactaaacttcttgagtagaacatgcccataaattcatgaaagcttagtcagggaataatagatgggagttaatcaagcaaatcttctctgtaccttgttttggcattgtaattatagactccaaaatcatgtctaaggtttcatatatgaatatttcatatccttacacacttccacatgatatataacattctttttgttatgtaatgtaatgataaatgttatgacctctcacctcacttcttctagaatcctatacttacattcacaggctgaagtactttcagctgttttgttcattttggtgtaagatttatctactttttggtttatgtgaggtacttgtgtggtgtaagtagaacttctgctgttcaaggtgccggcaaaaggtgatgaagttgattgcaactgttgaaggaatcgcttccattgtcctagacccagacaaaaacacagtgacagtgattggtgaggctgatccattaaggacagtaaagcctgttagaaagttcagaaaatcagcaaccattgtgagtattggccccccaaaggaagaaaagaggagaagaaggaggaaaaagaaaaggaagagaaaaaggatgctgttattcatactccgaatttgagctagagatgtgatgtgtggcctcactggtatgtgactgttgaagatgggtatagtcactgtttcattaagtaaataattaatttttcttgtgccattcgtactatcttgttaatttctttatgacagataaaatagtttatatgttacctcttctttgttcacgtccaaccttgtctcactggaacatctgcactgcaggagcagaaatttaaattgatttttttgtcatcaaaacatggtatcgaaattatttatggatgaagccgtacattatgtaaaaattatcgcattgattttacattcttattgtcgaatatgatgtgattcacgtaaccgagcttatctaatagaatgaggttattgctattgtaattgttgttggattattgaatatgatgcataatatgtattcctctgcttgaatggattgagtgttgcattgaatctgcagaattcctcggctgcgagactggccgtataaactataatgatggttctaaacataggccataatcaattttatttgatccgtacggagacaatgctctcttctttttcaatatctgcattagtagcaaggtgactataaaaagaattacatggtcactagtttggactgaggcatgaaaaaaaatggttctataaagatcaacccttaattaaaaacaaaaaaaaattgaagatgggcaaatgaaaaaaactagttacagaaattaaaattttggaaaatacaagtaagcattatgttatgattttcataaaaatctattatctattacttgtaacatttgtataaataaaattgatggaccaataaggtccaacacaattaatagatgattggatttcttaaacatgctgataactttgttggaagtgacaaatcccactttagtgatctctacgtctccagggttaatcctacgacttccggctttggggataccttacttccaacaaaaaaagaattgatttgcgtggtctgtttgtgattgtgcaaagctagtgagcagcactatgatatgtttgttgaccagaccaacagtacaagaatttgtaacataacattatggattgatgatattatgttgccaacttgccttgctgtgttagatcaaattaaggttgttaaacttcattcatggatcgtaaatttgtagtagtagaagaactgtgaagatgaacaaataatagcatgtacaatgaatcacaagaaacgtcttgatccagtgtcgttgtgacaaggtcacattgatatcaggacatgcacttcacatttcctatatctaagcagtcatctagctacaacatcttgaactgaaaaaagataatgatacgaagactcaacttacacgtaacttcacat

SEQ ID NO: 365 - DNA, 5427 bp, Glycine max
  source 1..5427: mol_type = genomic DNA
ctgaaaatgttttcagaaatcaaaccaaacatattttcatcaccgttttctgttttcagtgaaaatgaaaacagaaaacaaccaaaccaaacaccccctaattaattgaagaaacaaaaaatttcaagaaataaatgacttttatttttttaaatggtaactaaatttttttatatcataaaactaaagaaatttattttattttggaaaataagtagttatattgattaattaaaaaactaattaacaatttgataaccggataaatagatagataatcaaagcataagagttcaaatcttaagttgtattttactattttttaatctctttttttcctaacttctctcttatagaattcattattagcgtttgaatatatttatcgcgggtgagaagacgaaaagtcaaaaaatattatgacaaatatgcccataggctgacagtccacattgacaattatttcatgacaaatttgtccctccgtgtcacttaaactattttattaacggtgatggatgttacggtcaaatatatttgttacactctttacactttaagagactaaattttgtattttcatcttttaagaatacatttatcattaaattacacattaaatgacaaaaatgattatttatcctaaaaaatataaaagtcaaattatacttttaatgtatcagttattattgttttacaattttaatcttcatgtttcaactgtaataattaaattttttcaaatattataaatatataattttagtcctttcctaattcatgatctatgatactcgtggaacacaattaaagcctttaaaactaaatgggggtggggggtaattaagataaacaggaaaagacaggtgtatccccgaatcccgaatcccgaattgatgcgcataaaccattcattaagtggccggtcccttcttctctcccttacacttgctcctcctctctccttctacattactctctcttctcctaaaaatttctaatgcttccattgcttcatctgactcactcatcaatggctctgagactgaaccctatccccacccaaaccttctccctcccccaaatgcccagcctcagatctccccgcttccgcatggcttccaccctccgctccggttccaagttagtccctctctcagatccccctcttcacaaaccactctccccttttttacctcttttttatttttccataaactaaaaatcacgcatttacctcttttcaattcgattctcaactccatttatcactttgatctaccgttttgttattttattattattattattattactgttttatttcttgtttttctagctctctctctctctctctctctctctctctctctcataatagtggctttcatttgtgtgtgtaatgcctgaaatgaaagctgggaacagtgaaaacgacgcgccagtttttttcgcgtttatttttgaaattgacgtttttcttttctttaaaattaagtattttgtctgttgaaaaatgctaacctcggaagatatttttaatttattggttgggccattcccataggtttgatttggtaatctgatggttggggtggtttgatttcattcaatacaaaaccattgggttttcccttttttttttctctctttactttactttttgggtttgcatgtattttctttgggttggtgagaattggaaatggattgttatttggttgagacttgagaaatctgtttcatcgtgctacaataccgacaactttttatttcacttgctcagtttttctgttagtttgcacagtagagaaacgtgtggttaattgaattgggtttcatgttatcaattctgctgttcactctttcatattttttgaaagaaaaaaatattgcatgtctgtgtcattctataatgttcaacggttttgcaatccatgtcgaaattctaaattagtccacctgaattttgctcacgttttgtggaacttgttatttctggtttattgtttgatgttggcacatattctctaaattttgactttatttgttgggattcttctttcttcttcagtttcgagtggaatatataatcaaccatggagattggaacttgctctgtattgataccttgtgattgatttgatatggagtatggagtcttgtttcttagcccatgatttttgcatatattggtttgatgaatgttgccaactttttactaattgtgatcctcttgttggaggtgaaaataaaaagtattggtaacagttccaaattgttatttgccgttgcatcaaaatagtttttctggtcggttgagtttttggatgaagatttgaataacctaggcatgatgtaggcacgttctgtgaaactgtccatgtatgactatgtgtgcagtttgtgttgatcaatgatgcatgtgcactccattttgtgtgccatgcacatgctaggtacaggtacacgttgtgtatggctaggtacgtaataggtgtgtacaataatcttttctatggaaatgatgtgatcatgtgactgggtatggcttgggtttcagccgattttatttgccaaaaatggcatcatttccccaattgaagatatgctccccaccctcccaattcatccttaccctatacctgatagttgtgagcagagtgtctccagtttaatcatagacattggttgtgtatcttgctgtatcaaaactgattaactgtttgctatgatgccatgcaaacttcatgttccccattttttatgattttttctgtgttcatgtaatggtgtataactgttgtacatgtgggggttatatgattattgtttctaccaataataccattcactctattgatcaaatttaccggcatatgatcatttgaaaagttgttttattatttctctaaaagtcatttgaatttctttgtagagaggttgaaaatattaagaagccattcactcctcccagagaagtgcatgttcaagtaacccactctatgcctccccagaagattgagattttcaaatctttggaggattgggctgaccagaacatcttgactcatcttaaacctgtagaaaaatgttggcaaccacaggattttttacccgacccctcctcagatggatttgaagagcaagtgaaggaactgagagagagagcaaaggagattccagatgattactttgttgttcttgtcggagacatgatcacagaggaagctctgcctacttaccaaactatgttaaatactttggatggagttcgtgatgaaacaggtgccagccttacttcctgggcaatttggacaagggcatggactgctgaagaaaacagacacggtgatcttcttaacaaatatctgtacttgagtggacgagttgacatgaaacaaattgagaagacaattcagtaccttattgggtctgggatggtaagatcctatacaactgtagtctattttggtcttctgctattgtagttttattaatgaatcacacaattatgcaatgtcaaagaaactcttgctacccatttatagatactttatttgttttgagggggtggggggacgactgcctgaaatataaattttattgattaattcctctggatgcattaatgtgtcactgtcagcaacattcatattcacacgagtgtctttaaactattgaaggatcttctcagaatgaagggctagattacaaagaattggatgatactttcttgaaattcattagtaaaaataggttattatgttgctctgaagtcattacactaattgattcttcatagctgctgcacttatcacatttctggtattgacctttcttgactgattgaaattgatggataggatcctcggaccgagaacagcccctaccttggtttcatttacacttcatttcaagagagggcaaccttcatatcccacggaaacacggccaggcttgcgaaggagcatggtgacataaaattggcacagatctgcggcatgattgcctcagatgagaagcgccacgagactgcatacacaaagatagtggaaaagctgtttgaggttgatcctgatggtacagttatggcatttgccgacatgatgaggaagaagattgctatgccagcacaccttatgtatgacggccgcgacgacaacctgtttgataactactctgccgtcgcgcagcgcattggggtctacactgcaaaggactatgctgacatactcgaatttctggtggggaggtggaaggtggagcagctaaccggactttcaggtgagggaagaaaggctcaggaatacgtttgtgggctgccaccaagaatcagaaggttggaggagagagctcaagcaagaggcaaggagtcgtcaacacttaaattcagttggattcatgacagggaagtactactctaaatgcttgcaccaagggaggagcatggtgaatcttccagcaataccattctgagaaatgttgaatagttgaaaattcagtttgtcatttttatcttttttttctcctgttttttggtcttatgttatatgccactgtaaggtgaaacagttgttcttgcatggttcgcaagttaagcagttaggggcagctgtagtattagaaatgctattttttgtttcccttttctttgtggtagtgatgtctgtggaagtataagtaaacgttttttttttctctggcaattttgatgataaagaaaatttagttcttctgtggttggttcaattttgccatagggtaactgaaatatatgctttactaggtaattttattgtgtatcattttgtcaactgattacatgtaatcttgctgggatatggcttgttattttcatcctgttttactttggtgcttagaattcaggtgttatattttaatctaatttattaataggtttttaggttaatttttttaatgactttttcatgctactaaaagttctaatgaaatttttattaacgattctatatttccgttataagttcttaggtcttaattataaaattggccaaaatcaaattaataagataaataattattaggaagtatatatattttttatttgtaagaaaaggaaaaggcaacaaagaacaaaagaaacaattaaatcctttgggttgtgacacccatggcatcaccaacgttaagaattttataattcttaattaattaactacatattatattataacatttatattagttattttcatttaaatgaatttaatataaagtgatttatttaagtgagtctattagactgtcaagaaattgataacatcagtttgatccattagaggataatgagaaccgtaataggtttaaaatataaggcatgcttatgttccctatcatacaaactctcccatttgaagagaaaatggtcccataaggaagaaa

SEQ ID NO: 366 - DNA, 5549 bp, Glycine max
  source 1..5549: mol_type = genomic DNA
ttatattttctttattatatctaacatgttccttttctgtttttgtctgtaaccaatccgagagtgaaaaagaaagtgaagcctacctcgttcaccaagaaaataaatagaaacaaagaagtgtctgcataaaaaatctaagaaatgataagaaaataattgttaatgttgtgattcaataagactacatgtgataataacttgaaaacgatgatctttttaggctataaaatcgaaagaattaaaaaaaaaaaaaaaagagaggtaagaaatatgtctaaagaaaaatcaacggcaactcgaaagtgagaccatatatgaattaatgcactgaatttctgtgtctgattgtccatatttttttttatcttttacctttatgtaatggagagcccattaggttaatgaattgtactgagattcttgtagttaaagtcccattgtgcttttatgatgaatataaaaattattagatgcacttttttctggtaatttctgataccccacttcacaagatgcagtgccaagcaatggaacaggattttgtgtgtgtccatatatatatatatatatatcatcccgggtgttgttaaagttatttcatccaaattaacttaataaatacgagggaataattaacgtgttaaagttaatattaaattatttaagtattatttaaatttaattattgacgaaaataattcttaatcaaattttatttatcttctgaccgattaaattttggattagttaacatctcttcccttgataagtgggaaggttaaaaaaaagttatttccgaatccatgataagaataatagcagatgcattatatgtgaatttatgccggtatctttatctaacatttaattattacactacagatgcccataaggccatctcaatattctccaattttaagataataaattagtatttaataatattctgggaccgttttctataatatcatatgtgtgacccatcaagctttgttgttgaagttgtcctccgttggggacttctttgaacctcttattgacccatctaagtttggttgcttagttttcatcctttttctattgattctttttgcatttggtttaaattcacgtgaagacaacatttagacaaaactttttgtttgtttccatgtactctacttcgttaatgtcaattcattaatgttcattcttatcctttttttcttcttctctagaataattaatagctaatgaccttgcacggtagcatttagacaattagattcaaatcttatacctcaaggcgtttgggaatacaaaagagaattttatgccataggctcgaattggcattactattgttacctttccaattttcttctaccttcccccttccatttggtgctccttaataaggttgagcttccaaagagttattatgttatgtatgatgctacctcacaatttgtagcacatacctattatagtctacttaccatccaacttcaaattttgtgtcaatgaatgagaacaaaattgattggggaggattgattcaacaaagtcatgtactaagtggggattttaattctgagtttggcaatcgttactgtcaatattttgatatcagacaagcttggaatatgggaccacttgccatggttggaggagaagccatagataatgagttacaaaacataggccatgccaaatcatctggcaccattatgagccgttttgagtcaccagcttctgccttttatgctgcagaaaactgcatggagtttgcagaatatgattgccaagttggtattcactctttgagctctcagttatgcaagattaatgatttggagttccccttgtatcaatctccaagggaaaaccttttcttggattcagcaaaccaatctgaaaccaactttgatttatcaaacactttgcaatccatagtgaaatctcaactgaatagtgctaatcaatgcagtagatcccctgaaaagtccaataaaatttcatgtgggaattttcacagcaccaagttccttccggttgaacaacagaagttgttcattgatggtcttatcagtggctcatcatttcctaacaaaggaaatcaagaccatatggtaccattttatattcattttattatgttatatgtagattttgtcatttgttcattctttggagattcaattggcttataatatttcatttgtatgcatgtttcccgtggatctttcaatttatctgttccacagctgagattctcttctcagattgagaggttgtctccaacactttcagcaggaagtgtgtccactattggaaactctgcttctaatgtggcggccgtagtgtcaagtaaaacacgtataagatggactaaggatcttcatgagaagtttgttgagtgtgtgaatcgccttggaggcgctgagcgtaagtaacttgactgaattttttattgattggcaatacatctatttagcatctgatagtcctctctattggctgcttgactatagaggcaacaccaaaagctatattaaagatgatgaacactgatggtttgactatcttccatgtcaaaagtcatttgcagaaatatagaattgctaaattcattccagaacccagtcacggtaatttctaatcatttttttaacaaatttgcagtgtagttccttttcatgtcatgtacatttcttggtgcttgaatttactggcattcatgtcataaatgatgagcagatgtttttgctatagtgcttgtcaaggccgaggatgtagtgcgtgtttggttcaacatcttagatgtgattttaagaagctaatagtcatagcatccacatctcaaacgtgattccttccttttcaatgggttttcaaacatgctaataagcttctcttttccccttggttttgaatcattaattattgtcgtgaacttaaataaactaacgcagattgttcactgatttaatgtctttgtggttaattgacttcaagtgtaggaagttccaatgcagaataaatgcatttttatacatggtagaaagtttgagctactaaatggcaaatatagtctactttctcttcttgatgatagcaaccttagtcaaactacttaattaccaatgcttgtttcttactgtgaaatatctctttaggacatgagtgactgttctttattgctttattcttctctccagttattcataatcttcattgccttcattgttcttacattctttcaaatattaggttcattccccatactgaacctaaaaaattgtcctgtttcagggaaatctgacaaaagaacccacacaaaggatgtgcatcatcttgatgtcaaaacgtaatgctacttctattgcacataccactgttgtattcctataatttcactacttccattaagttgcttagttcattttgtaataactttagttgttacgttacaaatttactaaatctacactgctcttgatttgtagtggcatacaaattagagaggcacttaagctgcaattagatgctcaaaggtgtcttcatgaacaactagaggtacatccttgctatcattttctcttacaaccttttatttatgccagtacatttctatgctctccaagcctttattgttcttacgttgtacttaatttttccgacccttcccccttctggccttctcttataaaaagcttcaatattggccaaaccagctgaaaggttcttgaaccttgagcattgaatttcacttttttacctgtaaccggctttgcatgaaagaaatgatgcagagattttaatcacagaagaagaatgaaagtccaatagtttcacatgctcaaactctaaccactacttttaaaataatgcatcactttcaccaacaaaatatgatatatttaaaggcctttaatacatctttgtctatttgcagttttggattcttctaattcaagacatactcaacacttagcttgaaatcttgttttaatttctcatgcaaatatgcaatctagttttctgttggcataagtgatgatgtcaaattgcagtatcaagtgctaaaaggtggatataagtttccagttattggttgaaaatataatgaggaaattggatgccaaaattaatgaatgagttggatagttaggttcttataatataacactcttttcctaacttcagattttcaattatcatacttttttggtccagattcagagaaaattacagttgcgaatcgaggaacaaggcaggcaactaaagaaaatgttcgaccagcaacagaagacaagtaatgacgtctctaatactcagaattcaaccattgaagagacatcaattagtcataaagacggtgaaaatgcttccgaaggggctaacaacaattccttcttcccttccaagacctctccaagccaataatttggtggttcatatgtgtataaaattacagttttccaaaagcttactccttgtaagatacagatagaccacatcatgtgattttgttatgggaagaataacattgttctttatactacagtctacaaatgcaaactctatgaattagtacataatttagagtgattacattatatgtcctacagaaacaagaagcaatattgtattacactagctttactgggggaggagggaataaacaatatagggagggttaaaaagattaaaaaatgctgacaacgcatttttaaataaatccttattattagttaaaatttataaaaactaaaaattatgagtttcattctttacgtaataacttatattcatgattttgtaatttttaataaattttaattaataataaaaatacattcaaatatactaaaaagtttatgaataacattcctccataccgtgtcaaataaaaaaacattcctcaaaatataaatttataattttcatctcagtctactgtatttaatgcgagaatattttttttagagtttaatgcttaattatacacttcatcattcaattacaaattataatttgaattattttaagataattattttaaaaattaataaatttattataatgataatgatatgttgtaattgaatgatttgtgagtaaaatattacttattagtgcaaaaaaaatttccaatactgaaaattttcaatgttatatgagacccacaagtcttgtatgtctttgtctctccaaccgtaaaaatccagttgcaaacaaatttaatcacttataaaagaaaatgatgcaattaaatatttatctgatgatttaactactttatcatgtcaaactctaggcacaagataacggataaccaatgacgttggaacggggcattatcttatgccaagtataagcaaaaaatgattaattcaaaattttatgttttcatcttgagaaatgttattcttatttaaaatttgtataatacaattctccaaaaaaaaaaaaaaacaatcgtataataacaatgagaaaaataaaaaagagaaacaaacacagaataaagtgagtggtgtgatagaaagagcctaaaaata

SEQ ID NO: 367 - DNA, 9139 bp, Glycine max
  source 1..9139: mol_type = genomic DNA
aatatgttacaaaaactttctgacaatataaattgtcacaaaaattggtggtataaataagtagctggggactaaaacttaaaaatttatcgaataggaataagaatttaaaatgagaataactataataattaagtgaataatttgtgattaaaacattgttattccaattctttaactcatgtgtacgattttgagtaatgatttatttaagaaacataattgctatttaatttctaaaagttaatctatttttttataaataatgaaaattataaaaaaaagcataactttaaccaaattatacaaaattatatttttatatagttactttaataaattataaataattatataagatttttaaaattagaattattattaaaatatttttgttaaaaaatatattaaaagacatattccaaattgcatcaattcactgatgaaagtcctgggaataatcaataatgaattgctgcaatttctacaccgataatatatagtagtataaaaattaaacccaaatcagaaaactcaaataaaactatcaaaagaccaatgggcttcactggacgccgcataggacatgttactaagtaaaattttaggtttgaatttgtgaatgaaaaaatatgattaaaaaaaattgttaaaaatattcaactttgataaaaaataatcctccataccgtgaatattttatattaataatataataaaaaattattaaaaataatcaaaatttaattttaattaagacttaaatatattttttatgtaatttactacctaaagaataatttattttattttattacttgatattttaaggtgttataaggtgacaaattaataaaatgacacctaatcatctaatgcatttagattaacaaaaaataaaaaattgaaaatatcaaatatcagcgtcttgtggttatgcaaggatgggtataatagaattggggaatggatcctacaaaacggacaaagcgtgcatttaaaactagaaaacaaataataacgcaactcccacccaaaccgtgagtgcggaatctatcaatctcaaaccgttgaaaacacgatgcgaaatattttcaacctcaaataaataacgttgagtttccaaacttaccacactcaatcacgagccaaccataggcgaagaacggaagaagccaccatagtcgtcgtcgtgagcgaagatccataacaatacagttacaaattgcaacaacacactcctcgttcgatcgtagccagaagaatgggaagtttgggagcgattctgaagaatccagatgacttttaccctctgctgaagctgaaaatggcggcgagaaacgccgagaagcagatcccgccggagccacattgggcgttctgctacacaatgctccacaaggtttctcgaagtttcgccctcgtcattcagcaactcggcaccgagcttcgcaacgccgttagttccttgcatttctcgctccttcctacttatgcctttgattccacgttttttcttaattgacatctcttttttttttttttttcaggtttgcatattttatttggttctgcgagctctcgacaccgttggtttgtattcgtatcttcgatttgaagcctcgcgttgtatttcataacttgcgatgatgaacgatagatatttcggttttaattaactacgctgtgttgacgtggttgttcggtgtttaattttgacttatttctttatttgtttgttttattcttagcgttgaatgttgttgagtggggattgatgttatcgtcgaacggctttgggaaataaaatgtgattttaagattcacctctttgaaaaagcttttgaaaatgaaaactcaacagaaaagcagtaacacaagtttttttttctttctttttttgttctaaaaatcataattattatagaaggcatgcaaaatttgcttacactgaaactattcaaagtccatcaatctgctggatatttattgtgtctattgtctttgaaagatttatgtttaaaccttaaaattattctattgagcaactgttctattcttcagagattaaaaaggctatctatattgttgtgattttttttcttttcttttgacagaggatgatactagcatagaaacagatgtcaaggtgccaatactgatagcctttcaccgtcatatttatgatcgtgattggcacttttcatgtgagtgagtcattctttttgcttttctttttttaaaataatttcttgccaagataagattcaatacaatttgaacaaccttcttccaatctgttgtttttttagatgtaagtattcaatttaaccacatctagcttgattggattttaaactacgtacccatagcaattgcttgtaatgatatcaaagacaacctttatcaatcatcaggagaatggttttattgtatatgtgcctcaaaatttattgatgctgatctgcacattaattgtttctaatgtgactaggtggcacaaaggagtacaaagttctaatggaccagtttcatcatgtttcaactgcttttctggaacttgggaagaagtcagttcttatacttgcacatttagctaaattgaattttaatattctgcagcatatgtggtctcaagttgctgtttgtttccatccttgatccaatcagcagccctttgggttttattgccaattctatgctattattgcttattacccttggggaagaggagaggggggtgtactgtttatcattaagacatgcaactaaaatatcatttagaagttagtttgtgaatagcattttgtgagattcaatttattatcccttttctgtctggaatattaaaatttggatacggaactgttgtggcatgttgttggtctggaggttgttgtcaatgtcatgcaccttttaatgtaattacttattatgttgattattgactacacattatggataactatggtcctttgtgtttgtgattgataagaattatccattgtttccatgctatatgatagaggtttctgtatttttttttcactagctgttacttaaatttctgggtatctgtccattgctggtcacattccacttaaaatatttttttaaggctgggcagagggggggggggtctcattctataatttgtcttttcacaattgagttgggtctttgagatgtgtatatggactatagattcactgcctttattagcttctctcatttatgtgtaattagagttgtggctgtgcattctataacaaacaaattaaatgttggtcaatggttttgcagctaccaggaagcaattgaggacattaccaaaagaatgggtgctggaatggccaaatttatttgcaaggaggtttgtcgcacatggcttctgttctgcatatattcttttcattaacttagttgtagttaattaacctgtgctgacaagagattatatagagtttgttattcgtttaaatgatgtctccatctgctagtttctgttttttattgtttttttaaatgatttttggtgcttcaaactatcttttattcaggtagatgaaaatttagggagaggggaaatataatgaagagaaaacaaatagtctagtagttttattccaacaaaaaattccttaatcatttgatgttatactattattatcagtgcatctatcctaaattcttatgtacagagcactatgctgcaaaggaattcctgcatcatcttgatttatgacaagagatttttttatttttttccaggtagaaacaattgatgactatgatgaatattgtcactatgtggcgggacttgttgggctgggtttatcaaagcttttccatgcgtctggttcagaagatctggctccagatgacctttccaattcaatgggcttgtttctacaggtatcatatcatggtagtaagtaataaaaaaatacagtatggttgcaattgtttactgataggaatcttcagtttaggaagaaagaaaaagaaaacagagcactttaactgaaagagatgaatctgttttatcgaaaggataaagaaaacacaaaggagcaatcctcctttcacacaagggaatatccctgttccactatggatacaactcgatgcccctccttgtcctagcaaggatccctttatacttctcagctgaactccctctaacagaattagctgtctaacagaagtaactgtctaacagttctaactgaaaggtctaacagaattaacagtattctgtttttagactctttccctcctcctatatactattagaggtcttggttgtggctgaccttgatcctctttcctaacatttactgatatttctggccatcttttgagattgcagaaaacaaacattattcgagattatctggaagacatcaatgagatccccaagtcacgcatgttttggccacgacagatttggagtaaatatgttaacaaacttgaggtttggctctatactatagtaatttatatttaacctcgttttgttataaagttagaaaatcaattcttgcattttccaatgaaaacacacgttccaaggcaaataattaaacagttgtttgacaatattcaacagttttgttcagattaatttaagcatacagctcaattatattcaacagtttaaaattaattctatcaaacgcttaactgaaggggtacttagtctaacataaataattctttcattgctttctcccccatttcattaatctcatacaaatttcttatcatttgatggagtgatggtgaaacctgtcacacttttttttacacttgaatacctttttaactttttttctgtgtccaggtgtgctcacatatgattttcttctttgttactccaatttaacttttatgattcaggatttgaaatatgaggagaactctgttaaggcagtgcaatgcttaaatgacatggtcactaatgctctgatgcatgctgaagattgcttaacatacatggctgctttacgtgacccgcctatatttcgcttttgtgctataccccaggtgctgttcttttacttaattacttctgatattactgttattaagttcatgccaatcatcttgcaatgatataccatcatttatctgcatgttttatattgtttgcatatcatgttatgttactacagtagagttgaatctttagcagcttcttattcaattcaaataaaatacgaaaaaaataaaattactatgttctgtcagtttcttttaagtttttagcttaacacttcccaaaagatgtgtgaaaataactcatttatatacaaatttttataaagtgctttgcagaaacatagtggtaaaaccttgagacaaaatatttttaattgtaatttcatgtacaacaaatgcaagagtatagatcttctttctatggttgaacgattttctagataattagtggctgaagctttaggtatgtaaccttgctgattttagttaatattacctggaataagaaaatatttcttttgagctgcagatgttctagaggaagaagctgtatgggtcttaggcctacaatttagatttaaacaagttacagtaccttgtggtagatttactaggttcaatctgatatggaaccaatttttttctttatacattacagttgttttgtgggggtggggttagttctagttcatattcattttgtgtttaatgatttaaacaaattacagtaccttgtggtagatttactaggttcagtctgatatggaaccaatttttttctttatacattacagttgttttgtgggggtagggttagttctagtacatattcattttgtgtttaatgatttatgtatatcgcaatagttattttcataatttttcccgtgtaactttgatgtttatttgacatatgccgtgacagataatggcaattggaacacttgcattatgctacaataacattgaggtcttcagaggtgtagttaaaatgaggcgaggtaagagcaaatattttgatactaatttccttgtgatttgattttgaggcatactaaacataaagtcaaacttggtatatgtcagggaatgtgtctttgaagtcctaggaattgtgaattgctgcaatttgtatttcatgttatttcatgctgaatcaatctccataaaattaattaccttggaatctgtttgttattatggaatccacatatgcatttgtgtcaaacataacttttgtatgggcccagcacgaagtcattgagcatcttccattatattctgtgattgtatcttggatgttcaaatatcaaatctaaataaatactttgcaactattactaccacacatcttctgtagcattctcctcgtatgcatgttggttaagtactgaaagacagtttgaacttgggaagagtggccaatggcatatacttttgagttaagaggtcagcagctgcaattctatgatcgatatccctagttttgaagtgaactgataataccttaacctagatataaattattagttgaggcatttgaacaatttcctttcctcccatttcatttgacaaaatattgtttttttcttctgggaataaaaaaggatcaacatgtagctattggttttcgtgtttgttgtctgctgttgctctgtctgtgtgtgtgtgtaatactaaactagctgttatttcttcattttgttttcacttttcaatttataggtttaactgccaaagtgattgaccgaactacgactatggctgatgtctatggtgctttctttgattttgcttctatgttggagtccaaggtatgaatctttcgttgtcctgaacacattatgattaggttttcaacagaagaatgtgaatgctactcatgttgcattttacattggataatgttcctaattcctaattcctattgaatgtttataacagcaaacacattagttttacgttggataatgttgctgcttcctaccgattccattgttctaaaggaaaagatatattttagtatccaaaattttaaaatgttgatcttgttgcagtctttttttccctacagccgtagtacattccatccaccatggaactaaaagcagtttttcagtttcaagagtatcttttaaaagctgactttttccaacttaaaagattcagtattttcctttgtaggttgacaaaaatgatcccaatgcaactaaagcattgagcaggctggaagctatacagaaaacttgcagagaatctggtctcttgagtaaaaggtatgcacataaccgagtagctacaaaagtactttatctttttatcgttgacagtctagcaaccctttcattgatttaagcaggaaatcttacattgtgaaggatgaaagtggatatggctcaaccatggtacatttttgctttttttgttttttggcttaaattagcctctgatgtcaagtaataatgttaatcaatgatgtaacagcaacaatgacagtcatatgtaattttttttggtaaactgtgtttttaaatcatcatctgttcaaaacagttgatgagagatttaaaaacacaatttatataaaaaaaaaaaatacatgactgttctgctatctacattattttaactagatcctgcatttctaagaatatgcactgacggaaactattcctacagattatcgtactggtcatcatggtttccatcattttttcttatctgtctgctagccaccaaaataactagtgtaagtaagttttattgttaattaatgtacggttgaaattctaagaacaatattcgttatttataaaattcttcactcctttttttttttgtagcaactagccatgccttcttgcctttccgaacattgatatcatgcctcgttcatggaatgcaaatttgcacgcaagcaatattatgatggctgcagttgactatcgtgtattttaatggaaaaatagtcgaatgtagtgtcaagagctccttgtgttagtttggatttaactctacccctacgttcgtcctgaaaattatcattattctgcgtgttattagttgtttgtattcacggataaagttggaataccagatgagttataccagtggtgccccctcccccttttttcccctcgttgttcaaattctatagcgtggcatgccaaaatcatttacacgaaagaatgaagaaaggttaaagaggatggaaagagacaaaaagttaagggttttaatctgataattaatattcacaggaaattttttagatcaggatttgtccttgaaaactcataatcgtcgaatcacaatccatccattgtgatacaaccgtggtcaatcgcaggtttttttttaaaaaaaaaatactgaacggcaattactagtcccggctttaaagtataaactatcactttactgccctaatatttgaattgaaggctgcggttaaatattattttcacttaacagtaacatttatgattcgaactctacacattatatacaaagtttttttttttttgaaaggatatacaaagtttattaagaggtaatatacttctattgagaccaaccactcttaaataaaacaacaaataagttagatgtgtgtataaatagtagattaaatttgaaacaattattaagaaaatagtatattaaattaaataattagcttaaaaataagtaatagtaataagaatagaggaatatacaaatatttacatcaggagatattagtatttttatcctttaattttaagattaattttgattttgtcctctaattttttttatcaattcaatttagttatgcaatttctgttttttttctctctaatcaaaagggctaaaagcccaagaaaagaaagctaattagctattacacgaggaagtcaaagccccctagcatcattaaaaagcggatccttcatgaaagaaggatggtgctcaaaaatcaaaagagtctccttagcagaacaagcaaaatcagctagcttatctgcacaataattccgttccatcccacaaattgcatatgaaccagtcttcttcctgaaacacacccaagtttgttgccctttatagcagtcgagttagtgcttttgctataacgacgttaaatcccatt

SEQ ID NO: 368 - DNA, 6112 bp, Glycine max
  source 1..6112: mol_type = genomic DNA
aattggttttaataaattaatgttgagttatttattgattataatgtatgttaaaaattattttaattacaaagactccaatgtgttattctttttttgaagagaaccaatgttattttttccagtacaaacaattatgtttttgtcgttattatacttaacggtaaatttattattaaatttaagatatgtttgaatgtgctaaaaatattgtttgatctaatacttatcttcacacatttgcttttacatgatatatctaaaaccactaattactggtatatataaagaaaatgcgtaaagataagtttagatatttttgttgaaaataaagaatttcttcacaaaaattaaaataaataaataaatgacacaatttctcttgaaaaagattcaccaaaatgctcactatgtttgggtagtggtagtttgtacaatcgtacgtacaaatgaccaatgaaagattcaataaaatcatcaaatttcatattttataataataataataatgttgtcaaaataataatacaacatcattcttattttatttaattaaaataaaattaaaaattcattttcctaatttataagatgaagaatgatttgaaataaataaaaatataaaataataattattttaaaatatacaactaccaaattttaagttctagccaagtactgcaattaataatattatatatttttccaaagtagtaccaacattggtatcaagaaatgaatgaaacaaattatattaaacagaatgattatcaagaaagaatagaaacaaatacacaaaataaaacaataaaacaaatatactaatataattagtcggctactccaccaatgcaaggaatcttttgtcttggcgagagttaaacggcgttgatgtcaaagagaaacgacgacacccaaagaggagcagtgacacgtgacaagcgcgtgggtccccagcacctcggttaacgacaacgtccctttaaaacgccgccgtctgttcaattcaacgttgggattcataacgtctctctctctctcaaatccaatcatttcctgaaagacaaaaacaaaaacaaaataaaaatcgcgttcagacacactcacaattcacacaccaacaccaccaatccccaatctctaacttttcccgagaaaattataatttccattctcttttctccctcagattcccggaaaatatagtattcacaacgttatattttggcaccgccaagctccaattcaatccgtcgtcgttttcgcgaattccgaatgcgtcgacttcgggttggagaatgagttctccgtgctcttcttgtggctgtttgttggcgttcttggatctctcttcaaaccctccacagtctcctgtccaattttaactctcttaggtaaatttactttaattatatttcctttgttgttagatttctagttttgtagttaaaccttgcatagttttattttggtgtccataaattgacctaaggaattttttttttttaatttttgtttcctttaaattttagttaagggtgtttgacttgggttttattgatgtgaatgaagtgcatagatggttccatggtgggtaggttctagtgctgttgtgtattaccaatagggtggatcctaggttttctaagatttctattttggctgcaagtcaaggtttttggggtgtctgcaaccaattgattcagcaattttctgcaatatcaaagaatagacaaaactggtgacagtaatttaaaaccttgggtggatcaaatttgatgattatgttttgtttgttcttgcaaatttcagctggaatttgtttattttttgtgaattgtagtcagtttaactatgtatcacacaaagaaattttcaccggctagcatggtgccgcataaatctcaaggtggtgctgaacagcttgcaaatgctggggttttgggtggatcggctgtaaaaactgctgcaccttctgggggaagtgggaagcaacgtttaaggtggacatctgatcttcatgaccgttttgtggatgccattacacaacttggtggaccagatagtgggtatttcttttcaatattgagattaaagaacttcctctcgggaattttcttttcctgataatttattattgtcttgcaaaagcttgtaggaaagagaatgtaatatgggaatcgtttgtctcatttttaagtatgtaatgtatgtgagccttacttggttttagcacatgaaggctggttatgtgtttttattgaaagctgtgatcaatttattcctgtaactgttgagtacttgttcatcttgttacttgcactccaaggattgcattgaattgcataccaatagacaataccatatttgaactgtgtgaattgaattcaatttaatgtagccataaatgagtgttaatcctaccttttaaattataaatgacccggaagttttattttgacacaaaatcagttcacctttttaataattttgaaaattcttcgggaagtgccatttttatttttatttttgagaaaaaatagtcatatctgatactcatgagtgaatatttttaattcttcaggaagtgccatttttatttttatttttacctatattcctggaaactttttaaatatttttaattaatcatggcaggagcaacaccaaaaggtgttcttagagtgatgggtgttcctggactgaccatttatcatgttaaaagtcatttacaggtattattatcttgcttaataatttaggtatgtgcacataaaatgtcaactttataaattgattctaattcttctttgatattgtcattatatatagaaatatcgccttgcaaaatacttgcctgaatcaccagctgatggtaaaggtgccttcttttctttttccctttcctaaaacaaattaattagaaatctgtgattttttttaaaataaattttggactttcagaccctaaagatgagaagaggatgtctggggacagcatttctggtgcagattcttcctcgtgggtatcataattgttttctttagataatttataactcctccaactgtgcttcctcttctgacattttaatgaaacctttacggcttccaggggaatgccaatcaatgatgccctaagaatgcagatggaggttcaaaaacgtctgcatgagcagcttgaggttcggtacctgctcttactattgttcctaattgctgaaagagaacactatttagcactcttacttcccctcttgttcagtaatcatgggttagaggtttagaaagagttatatgctaaaagataaaaaagaaataaaaacgatgataatacatactaatctgtatttctgtaagctggaaatagggcaaaaataatgggttcagaataacatgcaacaatatacttcctgtatctccccgatgatagcagacagatcatttctcttctgtttagagctcataccacacagtttttgcaagtatctaattttctcagcccatcttgatttcgctgttgtatgattaaacttggactctctacctcatccatccttgtattatatcatttccttaacaatctcagccattgacaaattaagtcaattttgtttgttattacagtattaatgatttttattttttgttgattgaatgaaattggaacatgtgacatgtatcctaaagagaagcaactgaataagctttcatgtggttgatgagtgattagtctaaatttaacttacaatagaaacttcaaatgtcaataataatttgagaatggatcaatttttacacaaatgatttaatatttaatttcgaattcatttattttttcttcatttaccaaaactttttgaacattccgtaagtacattgggagtaaatagaaggcacttcttaattggttggcttgtaaattttttgtaattctttgaaatatgtcaattatgttaatctgtccgagtcatgcatcttttgctggctgggtgaacccatcacttaaataagtattctgattaagaggaattattagcttctatttaacctcaggacttgcgtaaaccaataataagataaatgctactagttaaatttcatagtattgtgcttctattgaaaaaaataagtagtattgtgcttctattgaaaaaaataaatagtattgtgcttctatgaggaagcatttctgataatgataaaagccttgcatctttttcaatgacatttcaggttcaaaagcaattacaaatgagaattgaagcacagggtaaatacttgcaaaagatcatagaggaacagcagaaattaggtagtaccttgacaacctcggaaaccctccctttgtcccatgataagcaaaatcatcctcagtcagaggcttctggatctagtgatgcccttgcaagcactgtgtctccacttaaaaaacagagaatcgatgatggttccaaggaaggcttcactgcttcccaagtaagaaagaatgacaatgttggtcagttggatccaaacttatatgatgatgctgggtttggatttgatttggagacaaaaaaggatgaagataatgagagtggacagtaagaactaggatccatttgtaggtcaatgtgtctcattgtaatgtttagtgtatttttctggtagaaaatacaaatcatgctttgtaaattatatttcacgcaatccatttgtacatattaatgtagatatagatgcattcttctctcctggtttgaaagtcatagacactgcactctccatccaacagaaatgctttgacttgcattacacgtgtggtcatggatgatgaatgttgggtgcatgatacttatcgatgttcaagttatgatctaagtcaatatcaaaggtatcaattagctggtgacgacattgtttgatccttatagccaacctaatcaggggagaaaggacttggttcttattgttggagatagtaatgaccagcttccctttatattagttatttaatttaattatgtattttcttcgaggttaatgttgttcagcatatttatacttgtgattgtgatgctatctaacctatgaggctatgagtaatactatatcttctttctccgtaaagtatgaaaatattcaaccaaaaaaaaaaacaaaactgtactactggatgtattgtgatttgtgagtgtaagaattcttatattgtgattcaatcagaaattgacatttacactttcttgattcgaagagttttaataacattctcttttaacgtattttttgtaagatattctcttctgttaattaaaatttattgtagagtataaaatcagtaaaattatgtaatttctaataaattttaactaataaaagaaagggttaaaaaaatggtcaaaagagtgttaaagtatatgtttttacttcttagtatttcttcacttgacttttataatacattgtttttacacgttttggtagagaataaatttttgtatgtctgggaatcatgattcacaagcaatcaatgtttcttagaaataaataaatttatataaataaatttatttggttgactattgtaaatctttaaataatttttaaaaaaaattaaaaatttgtgtatatttttattgattattttaattatttatcatattatataatttaataaaaaataacatgacattttttttactgtaacaaaaaataattaaactcaaaaaaataagattttcacattttttatgattttttttttatgaaaaactgattaaaaaacatttattggtaccaaacatgaaaaattaaattttcaacctaacatttccgaaaaactaaaaatttatctccagtcaaaccgtgttctaagagatatacattaaccccaaacttcagcgaagctttgccaaaaagtagtgtttcagacagttcattatttatgactctgttccatagtaattgacattaatgttaactaagtatttcatgataagataagattaatgaccgtttctttgtctagtgtagcgttgcccctcttctccaccttaacaatcctttcatttgggtgcagccagtgcaggcatactcctacgttcaacattaattaggcaaacataag

SEQ ID NO: 369 - DNA, 5208 bp, Glycine max
  source 1..5208: mol_type = genomic DNA
aatttattaaaaactacttcatctgttcttatttataagataaatttattaatataaactaaatcagtttttttttataatattgatagaaacagagggagtataaaatcattatagttaaactttataaaatcataaatgaaactcattaaacaaagagtaaagattcacaattttatgatttttaataaattttaataaataacaaaaaatttatttaaaagcctttattcatctaaaatcattaaagtgtaagttactaatatttctcttacattataagatcttttttcaagttgtcttttgcattaaatattttttaatcgaaatatctttaattactttacaatgaatgttataaattaaaaagataaatgcattatttgtcttataaggattaaagaataagactagcatataatcattaattagataatgaataattgagtgaaaagaaaaacatgagtctcaataattttaagggtaattttgaaaagataatagaaattgctaaaatatttaatgttactaaaaattaatcaattttcttaaaaaaatatgaattagtgaaaagatcttatacttagagatcacgagggtatcatctaattaacttgaatatttttttggtatataatagtgacgatgataaaaacctctgttgtatttgaaaacatataaacaaaatgtctcttccaatccttaatcagcttgcaaacttcaattatggcacgcacattagtacgttacactatgttattagtgagttggagtgtaggaattattattggaacacaccgaaataaacgtaaaaatactatgtagtggtgaatgcaaaaaaaaaaaaaaaaattggcaaagaaattaattagagagttaataatatccaacgagcaattaaggaaaaaggcatcgtaggagcacaatagctgttgaatggagcgaagagagcgcgaaaagctaaggtatatgcttgtcgaatattttggacaagtgtggttttccttttcccatgttctgttatattctataaatcattggccactctccattcacctcttagtgtgtaaccaattcttctcttttgctttctctctccaaattcatcacaacttctctcgtacctctgcaggtcagattcataataatattctttttgtcctttttgttgcatcgaatccttctatatattgtcgcatccccatgcatgcattatgtcactacgtctactcttgatgtttcttttatatcccatttcatatcatgttttttcatgaatttacctgtttatgttctgttttactcttatcctaatttaatagatgtgccatttagacgtagcatacatgactcagcaagacgatttctgaattgatttgcagatattggcagggatttaatgattgtctttgcatgaaaattgaaaactgaaagcaaatatatttacattaccattaattttgtgtgtatgtcatttgttttttgagttcagatcgtgatatcttttgcattttctcgtggcagcagcgctagtttatcatatatgaattcacctgtacctgtttgttctcttatgtcctggtcttctttctaaaggacatatttgttcgattacaatttttcccaatgaattttggtacatctgaagcatactttttcattttttctccctcatacgtttccccttcggaggcaatcctatttgaggtactgatgggcactcatagtgggcatctctcccagcgaggattcgaaccttggttcgtcacgttgtggagaactagtatctcgttttgttaaacgtattggatacatattaaaataaatttgttcagaaatattagtatgcatcttgagtacgactttaattagataattgggtatagtttggtatatcttaaatactagtttgattgcccctatcttatattcttcttttatgttattaaaaaattgaattagcatagctttaattttttatgtaactaccgtgctcgctcaacttggttggaaaggccttccagttttccaatataaggtaacacatggtgctgtagctggattactctgcatgtattgtttaacatgcttttacctttcttatgttgtgtaactagaattgaaattctatctgtacataattgattatctcgcagcctgattgagttagtattttttatggttctagtactgttcatggtcatcatatggcagtcactaatgaaaaatgaccctgcatatgcatattggtgctatgtttttgaacttttagcacaatactttgtaatctgttgcatccacttttgcagagaagtaaacatataggagtgagagggagggagagagaaggaaagcttggtagcgatggggaaggagcaagttcaggtgctgaatgccctggacgtggcaaagacacaatggtatcatttcacagcaatcatcattgctggaatgggcttcttcactgatgcttatgatctgttctgtatatcactagtcacaaagctacttggtcgcatttactaccacgttgatggggctgcaaagcctggttcattgcctcccaatgtgtcagctgcagttaatggtgtagcttttgttggaacactttcagggcaactcttctttggctggctcggcgacaaaatgggccgaaaaaaggtctatggcatgacccttgcgcttatggttatagcttccattgcttcgggtctatccttcggacacgatgcaaagactgtgatgacaactctatgcttctttcgcttctggcttggttttggcattggtggagactaccctctttcggccaccataatgtctgagtattctaataagaagactcgaggtgcctttatagctgcagtgtttgccatgcagggttttggaattttggcaggaggtgtgtttgctattatcatagcatctgtgttcaagtccaagtttgattctccaccatacgaggttgatccgttgggttcgactgttccacaagcagactatgtttggaggataattctcatgtttggagcaattcctgctgcaatgacttactactcgcgatccaagatgccagaaaccgctcgttacactgccttggttgccaagaatatggagaaggctgcagcagatatgtctaaggttatgaacatggagattcaagccgagccaaagaaggaggaggaggcacaagctaaatcatatggattgttctccaaggagttcatgagtcgccatggactgcatctgctcggaacaacaagcacatggttcttgcttgacattgcattctacagccaaaatcttttccagaaggatatcttcagcgcaattggttggattcctccggcaaaaacaatgaatgctcttgaggaggttttctttattgcaagggctcaaactcttattgctctatgcagtacagttcctggatactggttcactgtggccttcattgataggataggaagattcgccatccaattgatgggattcttctttatgactatcttcatgtttgctcttgccattccctatgatcactggactcttagggagaacagaattggatttgtggtcatttactctctcacattcttctttgcaaactttgggcctaatgccaccacatttgttgtgccggcggagattttcccagctagatttagatccacttgccatggaatatcttcagcatctgggaagctcggggctatggttggtgcattcgggtttttatatttggcacagaatcaggacccgagcaaagcagatgcagggtaccctgcaggtattggtgtgaggaattcactgcttgtgttgggtgtgattaacattttaggcttcatgttcactttcttggtgcctgaggccaagggtagatccttggaggagatttcgggagagcaagaagaggagaccaaggtgtaaaaataatggcaacagaataattcagtgtctttctctagtttattagtgatctgttactagaataaagccgtgccttaattcggctagggaattgttgccaaagctttcccttcccgtttgattatttctttttctatttggttctgctctatcttgttgtaatgatagggacctgaggtactgcttgttctttgaattttgagaaaatagatattggaatgtgtagttcttcctataatcttcctgctgaattagatcattagagtaattattcttgaccacgaagtttaattcattcttctacattctttcagaaatttagacttctgcactgaatatgttctcgcattttgaaagtaataaatagtggagttggtttcattcaattttctctagcctgccacatcattttttcatctataaaagctaaggtattgattgacagaacttgttttctagctcggtttattatggtgttactgtgtttactcacctatttactcctttcacataaggagcaagatgattattattctgtgaaaaatattgagttcacttgagattgagacataatgagggtttagtaaggatgatgcctatataggataagggcctgtgctcttacttttcacaaagtgggaaagaaggtggaagaaaaatgactatcctcaataggtgttaaagtgttttaggtcagttaactttgtgctttggtaatacttaaggttaacgcaagtatgatcaattacatatatccacactaaaagaatatccaaataacaaggactgatatgcaaagcgtctccaagaaaaggatcatgactgaaattaggcttgatatctttgggtgtgtatcatggttcaattaggctcacgatacaaactgacaaataaatgaatgttaaactttagcaaattctcttggcttttgcttgatatctctagtatttataggaaggcttcaaggtattcatcgtgacttttgttgagtttctttacttttatttcttcaatgagagaaaatgattgttgggggcattaaatgtctttcactaattagtcactttgatatgataaaacattgtgtttatctctcctttcttgtacatgaaatcttttagaagttagcatgtttactttatattccgaaaagtacgttcaagttctatttcttataagcacaccttgttaggagttacagtagcttataccttgttgaccttgtttttttagcattttaagtgtacatttgagatatatcagatcacgggctcataa

SEQ ID NO: 370 - DNA, 4520 bp, Glycine max
  source 1..4520: mol_type = genomic DNA
taaatattttttttatttataatcttaattaatatttttttcaatttatgaaaaatcttataatattaaaaaatatataaattctgataaaatattttttagaatgaattttggatgaattttataaaaaaaatagtaaaaaatataagtaccacattcattaaataatttcacttatgttcttgacattttttagtactttttgtttgtcggttgtcaaaactatctttttatcacatataatatctttttctattcatcgaaggtaatgtacacattcataattttcttcttcacaacaaatatcaccatgacgataaagaattttcaattgaattaatagataaatcttcatcccctatttttagaagacaatgtaaacattcataacttttttcacaaaaaatgtcactatgaagatgaattttcaattgagttaatagaaaaatcttcattttcagtattatcagttaacaaataccgtaaatttgaatttgatattcaaattcaagagtgtgagcaagaagatgctaatgcattgaggcttaataaatacatgaagaaacattatacaggaagtcatttttttaaacggaactagaatcaattaactattaaaatattgaaaaaaattgtattagttttagttttctttatgtaaattttatcatttatttgttatcttctttgttgattcttataatcgtgaatgttttctaaaattttataaatctataaaatattttcaaattttttgaattgatatgttataaattattaaaataaaaaactacaaaattttaatcataaaaacaaaaatcttgtaaaattcacatgtaaaattatgaaagcctggttgggttttatctacgaagcgaagcggaaaaagtgaggcaacgacatatttggtgacgtcatgaggatggttgatgatagaaagaaagattgaagcggaagtacattgttgtcggaggctcaggcagttactgttactgttattatggaactcaaacaacaaaaactccttcttgttctgattctaacgcttctttttgccactgccacgcctgattctgaatacgttcgacctcttcctcgtaaaaccttaacaaccatcccatgggattcaatttccaaggcccactcctcttaccctcaacaggtgctcaaccaacctctctttcattcctcatattcatacataaatataatacttttgtgctatttattccctacgtgatcaatcttacagtacctgatttctttcgtatttgattgtattaaggtgttcagttgtgagggttctttttttttttttaatatagggttgtattttcaaaattattctctgtttcatgttatcgagtttaattatttatatggtgaataaaaaaaattatattattaatcaatcagaaattatcgctgataagactattaagacagtgactttggtagcatgtctccggggttcaagatataaccctgtaaggtttctttggtgatgaaattctaacttgatccaataattttctgtcactcttgtattgggtttatagttcatgaactgggttctagtcgtaaatcttcaaaagacattttttatttgtgatagttggtgatttgttatagtatctatgcacagacaatgattattgtttatctcattatctgcttattttgcaacttgaacagtttgtttcgcttactaggaattatttgccaattctaggacaaatattctgtgaactgaacagtcaaccgtgcttgttttattaagcaatcatatcggcctctttatgcatgttcgtttatggtgactattcaacttaagtttctttgatgccaaatgtttgttccaggtacacatttctttggcaggagacaagcacatgagagttacatggataaccgatgataaacattcaccttcatatgtagaatacggaacattacctgggagatatgactcaatagctgaaggagagtgcacctcttataactatctgctatatagctcaggaaagatacatcacgctgtaattggacctttggaagacaatactgtgtacttttacaggtgtggtggaaaaggtgccgagttcgagctcaaaactcctccagctcaatttccaattacttttgctgtggctggggatctgggtcaaactggttggactaaatcaacactggctcacattgatcaatgtaaatatgatgtctacctgctaccaggagacctttcatatgctgattgtatgcagcatctgtgggacaattttgggaaacttgtggagccgtttgcgagtacaaggccatggatggtaactgagggaaaccatgaagaggagaacatactattgttaacggatgagtttgtgtcctataattccagatggaaaatgccatttgaggaaagtggatcaacttcaaatctctattattcttttgaagttgcaggtgttcacgttataatgcttggctcctatgcagattatgatgtgtactctgaacaatacagatggctaaaggttagttgatttcacctattggtcaagagtttctataattggataagtgtaatgcaatccatgatcatggaaaactacacaatcatgcttgttattattattttaatttgtcttttttacactactctatcattttaaaaagaaaactactttggagtttggaccacttcatttttttcactcttaaatttttttctcatccctcatctacaggaagatctgtcaaaggtggataggaaaaggacaccttggctgcttgtgttatttcatgtgccatggtataatagtaacaaggctcatcaaggtgcaggagatgatatgatggcagctatggagccgttgctttatgctgctagtgttgatttagttatcgctggtcatgttcacgcttatgaacgttcagtatgtctttatggtttagcattttatcctctttgtaagcaccatttagtgggaaccgggttttaatactctctctgattgtcagaaacgtttgtataatggaagattggatccctgtggtgctgtccatataactattggtgatggaggaaacagagaaggcttagctcataagtaagtttcacagccagaaacatcccacagaaatctgttctctgaatcgtttgttatgtgaaaaaaaactatattgaggtttatcgtcatgtatgcagcctgaaatttgtttttctgtcattgttgctggatgtatccttacataatttgttgacaggtatataaacccgcagccaaagtggtcagaattccgtgaagccagttttggtcatggtgagctgaagattgtaaactccactcatgccttctggagttggcataggaatgatgatgatgaaccagtaaaagctgatgatatctggataacctctttggtcagctcacgctgcgttgatcagaagacacatgaactcagaagtacacttactatgcccgaaaactcagaacttcgtggattagcaaaagttatgtaaatattgacgatgagacaattccttagtttagtttgtatcactacaagcagcagagtgagtaaactgaggtatttcagtacatagctgctggttgtgctggtgcatgtatttaaatattctaaggacatggactagtcagtaaatggagtacaaggctagttgtcactttgcaattgatggtgttgcttgttttgtctgaacttttaagattggtttctgatttctatataggaaaaccaaaacttaggttacttaataaccagcgataaatatgtatattttatattcttaactgacattgagattttagattatgattcaagagccacgcaacgagtaaagccatgattactgggatgcacgaatgtctaattaacaaaatgccttaaatctgaaatcattgttcgctgataccagggaaatgggatatgattgaatgtaaatcagcaatctaagaatagaactgtaaaaacagcagagaggataataaagcattaagtgaaaacttctgggttggcctattctgtcttgaagtactaaaactgatttatccaatatacatgaaatccggtaaatagaatgtaattgcattaatcaagtggttggatgatgggtagctttagcactgtctgattctgatgactgctgaggtttctgtaatcattaatggtccagcatgatgcttgcagtgtctcttggcttgatgttgaaaccagcaagcatgagagccatgattctgtctgaaagttctcgaggaacatgctctccccactttctttcttccgtcccgagtttagtcaattccctcttattttcttcccctttccattttttttcatttttgctttgattttattctttttaacctgtccttttaaaattttagaaaatcatttgagctccttttattttgttctccacccacacacaactttgagatttctaagaagtaaaaggtgctacccattcctcaaaatttttttacatgatatctttgtgg

SEQ ID NO: 371 - DNA, 5856 bp, Glycine max
  source 1..5856: mol_type = genomic DNA
taatattgcctcgcactctatcatctccacctttgtcgacaacaaacccttcatcaggtccaaccaacaaacacaaaagcaagtattgaaaaatcaaaacacttataatggcatttagaggaatgaaatccagattcgaagtgaatgaatgagaccaagaatttcaaacaaaatcaattcaagaatcaagaaggataatcaaagaaacaaatgtaaaaaaaaaaggcaatcaagaagtgaatgaaagtgaatatccaaaaattacaaaatccaacgaaataatgaaaaacccaaatcgagaagaaaaaaaaacaatacacaacgaaggtaaaaggaagggatctttatccatagattcctcaacttttgtgttcgcattcaaagacaaactctctctgtcacattgttattctcgccaacaaccatattttttattgtttgtagatttataactcatcttcacacatgagattgcacacagtaatgaaagtgacctcttacaaactcattttcacacatgaggttgcacacaataatgaaagtgacgtctcaccctccaaagtaggtgattgtctttggtttcatgtcattgcaatggttgttccaatggttccgctgtgatgattgtgcttgcagtaaacaaaagagaaaaagtaggataaaagaggggaaataaaaaggggcataagaaaaagtgagggagaaaacatgtttgaaggacaaggctagaggatgacacatgtcagttaatgaaagttgctaacagttaatgtctaaattgaaaagatcaaaattgtgtgattagataaaaaaaaaggaggacaaaatgcattaataattttaaaaaattatcaaaattgagattagagacaattaaagaggagaacaaatttacaattttatcttcttggttctgatttgtgaagtgggccttattggactttagaatattgagtccatttgcaaggaaattggaagcaaatagaggcgtcgacgtgtctgttgaggttccagtgagtgacgggtctgtttgcagtccacacaaacaccatcatcatcatgttcttatctcatgttatgcgacggcgactcttctttcttcttcttcctcttcttcctcacattttcttattctatttctcattttacctgcacttggcctcttctacgccgcaaggcatgtttccaactttgctcattctaaattatatctctgcccttaactactattataaactaaattttgtaacttggctaatgaaaacaagtgggtatgcaatattcttggacaattatattttccttttattatagagtctttagtattccattttgggctatgattacctctgcattctaaatgatatcctgttgatcttgttgatttggttttcacagtatcaggttacatttggagttgaagacatatacatatattaatatattattattattattatattatatgtatatatggcaacgtggggtgcgcactcaatgttgttatcccatggggaaggcactggcactcccaaagtatgtgtaaaagcaggccttacggttagaggtgatttaaggtttcacaggactagaggttttaaatatgctcctagtgtggtagtgctcaaagtgttggccaccgccagaaagccaacacggttgcgcttgttaagaccttattgcagtgtgagggggcaacacgaccatgggaaaggatatttttctcccactaattcacaaataccacgggttagtaaccgctgcttagtttatcctacttcattgttaatgcaatcatgcttatcccttttgtgaaaatgcaaaatttgttcctaagattgcacctttatatccaatgtccatcctctgagtttactttacaccttgtttggatagcaacatatattgaaattcgccgcggatcgaatgcttgcgtttctcaaagattggagtaatttacgcatcacggcagtagctggcatattggtatccgttttaatgatcattccaccagctgatgctgttgacgctctcaaaacttgtgcttgcttgttgaaggattgcaggtatgccatctttctttctcttgttcttgttctgccatgactacatgttatggccaccaatttcatactcttttgtctatgcaggatagaactggctaagtgtctttcaaacccatcttgtgcggccaatattgcttgtcttcaaacttgcaacaatagacctgatgagaccgaatgccaagttagtctcgcgctttacatcaaattcatgcctgcaccattattcatgtctccaaatcctgctcatgaagcttttattttcttcttatttttccagattaaatgtggggacctgtttgaaaacagtgtggttgatgaattcaatgaatgtgcagtatcacggaagaaatgtgtacctaagaaatctgatgtgggagaatttcctgctccaaatcctgatgtccttgttaatagctttaacattgctgagttcagtggcaagtggttcatcactagtggcttaaatcctaccttcgatacctttgactgccaattacatgaatttcacacagaatccaacaaacttgtgggtaatttgtcatggagaatacggactccagatgctggatttattactaggtccgctgagcagagatttgtacaagatccttcctatcctgggatcctttacaatcatgacaataagtaccttcactatcaagatgactggtaatttgttattcataagctttcttttcaatttttacttagctagacatgtatagttaattgcaactacatccacacgaagcacattgacgtgagggttgtgctagagccaaaataaaactagcttcctacttacttgtagagttgtagtgtaattaaggcacagaccaaatcatgtttcttaattaagttaggagagttagaaaaggttgttttgatcattatcaggagataaaaaaattcagcaaacttgaataaaaatttaattggtatgaagctcgacttaagaaattcacacacatggtagaattcatcacaaatcactatactgattctagatccaatcattgttaatggttcaattgtctactggaaaacatcctctgattcaatcaatgaaggacaacgccaatttgcaattgcaacaccaatgtttaggtccaattgatttaagaatgatccaatttaattagaccgcaaattcattagtgtagcttctaaacaaattctgaaataaattccaaaacctaatcagatctagttcaggcataaacatgcttataaacagatttggaaaagaaggggaagtttgaatccaaaatagaattaagaacaagtctcagaatccaaatcattagccttctatagcaatcaccaatggagaaactaaaaatgcataaaacgcaaacaaggggggaaaaccttgaatctgaaaggtcacaactacacaaatggtccaagtctatttttgcactatgtttttcctcttttgtaactaattatctcctaatcccaagattacccttatcccaactattagcccatgtaataagcttttcaacgatatctcatttacctaacttgcccttgaatttaatgatatatgctcaaaagacaaaaggtatgtcatgcatgctcgcccaatacttctggtctaactctaaagctgaattttaacactgaaattcccgaattcgtcctttttacaaagtttgtagatatctttattaactttcgtagcatataaagaacgtcataattagaggtctatagcttaagttatgactaaaatgctgatatagtgtcaaaatataactaatgctgtcaaaattattcactgcccaatttggcccaataattcaaattagtggtaggactaatcaatcaagaccaaaacctcataagcaaggcaattaaatatgttaaaaatagtagttatcatacaccctgtgtttgaaggaagtaaatgttcctttcctagatcagaaaaagaatacaacatgttgttccttttacgtgtgcatacattaaatcatttaacatttgccagatatttgaatcaaagagtcttttgttaacattagaagacttacaaacaatgatatatatatatatataggtatattttgtcatccaagattgagaataaatcagatgactacgtatttgtatactaccgaggcagaaacgatgcttgggatggttatggaggtgctgttgtatacacaaggagtgcagttttgcctgaatctatagttcctgaacttgaaaaagcatctaagagtgtgggaagagactttagcaagttcatcaggacagataacacatgcgggccagagccttccctggtggaaaggctggagaaaaaggtagaggaaggagaagagaccattgtaagggaagttgaacagatagaagaagaggtggagaaggtggggaaaacggaggcgaccttatttcagaagttggcagaagggttcaaaatgtttcaagaagacgaggaaaatttcttaagagggttatcaaaagaagaaatggagattcttgatgggcttaaaatggaagccggtgaagtagaaaagctctttggacgtgccttgccgattaggaaactaagataagtctgagaaccatgtccaagataacttggcatcataatctttttttatcatctttgcttttattcgttgactacatatattgcatggctgtagatagctttcctccttaatcattgcttttatgttgacatactaatgattattcaaatatttgtaacagcatttatcaattgttgtatatatattcagagtattgcatttgcataggtttagatgcttgtgctttttttcaagtcgaaaatatttggaatgggaattccgacatgaggaatgctgtatactaccagtgttcttcctcaactactaatacatgaccatcaatcatattaatcattgaaataaaacattcactaattgttatcagtatggtgttttataaaaaaatgagttattcatataataatttatacaacattttttacctttatctttttttgtcacatcatttattgcatctcatgttttcctcttttctttatttctcactcaattgtaaaatttgttgctcaatttttcatataatttagtgtacaaataatatctctctataaaagcataataaaacttttctttttagaatgacttgtgatgcggttgttgagacatccgttttctccctttactttttctggtaatatagtacgtgtctgagttcatttatcaggaagaagtaaaaaaaattgacagtacatatgaatttatagaaattcatgggttgttcaactccgcaacacatggaccacaaaggaagaatcaatccaaagcaattgtcatgggcctaaactccaaattatccaagtttgagtcagtcagtgtcagacactggataggaattaggatggtggagctttatgaaaagaaagggataatatggtagaggccacgtcatcacttatttgtataaatgccttaattgaaatgtcaaaaaactatggaaaattagatagtatttgctttagttgaaatgtcaaaaaactatgaaaaattagatagtatttgcacatttaaaaaaatttttgaaattaaataatcaatacagctataaaaggaagaagtgattattttaagttgatatgcaacaactaatcttttattataaatgaaagacaacatttttcaatcagatgtcattttataaataaataaataaaaaaagcagaacaaatcttaatacttgaactttaggcaaatcaaagagagaatttgaacccgaaagaaac

SEQ ID NO: 372 - DNA, 3457 bp, Glycine max
  source 1..3457: mol_type = genomic DNA
gtattctgttttttaaaatatatattaatattatttaatattaatattgatacattatttttaataatattttatattattaattatgcataataattaatgatataaaaatattatatatttttcaaatccgtacatcgcataagtacgaaatctaatttaattatataaaacattacttttcattttttttttacttcaaacgcgtgtaataataagaaaacagtgaggaaggtttgtatgtgtggaacatttcataagtaaatttgtcattaaaatagctctgattgcaattacaaagtatgatttaagttgataaatgaagctttcgtatggatagattctatgattttctatccaaaatgaggggttttaaaaatctgaaatatttgtattatttccgcacccataataatatattttcatgtgcattaaatgttcaaccgttattttagagaaattttttatcctaagataattaattaatatttttgtactaggaatatccaatgctcctgcttgacgtgtcaattcaggatttgtcgacttgagatttccttgtccaatcctcctaccagctagtgactaacttccacgtttagattcaggaccgcataaaaccccagttagaatttggaagaatctagacacatcctttgtcctaattattgagcatttaagctaccattgcttttcaaaaactccagcttgatttatgttttttttttctttttttaaatgtaaaattcagcagaagaaatgagtgagtgtactaagtttgaggcaggaaatgaaaggacccaaatattatttcataataacatttcaaatgaaaacattatcaccatacccacaaatagtgtaggagacgtggtcactcttgttgcctgtcatcaactattacaccacatccacacccttgttaaattaaagatggtattccattctatcacattttggtaatctcttaaaatatagaacacactaccctcaacatagtaaagcagctggtgcaagtgaagcaatggctcaaaccatgttgctcatgtctagtgtctctagcagttattccgtggatttgaagaaagaccttttcctccaattgcagagtcaaagtttaaggcctaagttctctcaactctcattcaacccacttccaccatcaacttcttccttttcttcaccccgtacattcacaaccctggctctcttcaaatctaagacaaaagccgctcctgctaagactaaggtactcattttccatttttatcataaaaggaaacttgtgtctaatctaatgcttcttttttcagcacactgaatttggtttcatgatacattgcaggttacaaagccaaagcaaaaggttgaagatggtatctttggcacttctggaggatttggttttactaagcagaacgagctctttgtgggtcgtgttgctatgcttggttttgcagtaagtgaatcttaccatatggttcaactccttaatcgtcacattatatgagaattgagaattgaacatcttggatattagttaggaagatttagaaagaaaaaaaaatggaattaaatatcctaaaacaagtaactagtttaaaatatagtctttgaaattaaattgattttgaatttgccccagaagcattaagaaatgttgcattaatttgcaggcatcattgttgggtgaaggaataactgggaaaggaatcctagcacaattaaacctggaaactggaattcccatttatgaagcggagcctcttcttctgtttttcatcctcttcaccctgctaggagccattggaggtttaggtgaccgtggaaaatttgtcgatgacgaacctactactggaggtgttattccttcaggcaaaggcttcagggaagcccttgggctcggttcaggtaactttaatttttaatttcttaactttataaaagagtagtgattaaataatatcataagattaataatatgtaaagttgattttgtgtctaaagtgattaaaattccgttatatactttgtctaaatagtgtaaagttgcttttgaatatagatgtatatcatcatagtctaaattggttacatttttgataatataaaacttgggtttttggcattttcaggtcctttattcggattcacgaaagcgaacgagctatttgtgggaagattggctcaattgggtttcgttttctcattgattggagaaattattactggaaagggagctctagcccaactcaacattgagacgggggtaccaatcaacgaaatcgagcccctagtgttgttcaacgttcttttcttcttcattgctgctttgaatcctggaactggcaaattcgttacagatgacggggaggatgattagacactaacccttttgtttgcttgtgtttaaaatactcgtttcctcatctatcataaaatgcattgagttcgtcgtaaacaattctatatcatttttctcaatagttgcacgcgtctcgatgtcatgattagacatcattttttcctttagtaaattaaaatcatagtacttcgatttatctgtaaaaatcataatggaactcaaattaaatctcctatggtctcaatataaaatgagatatcattccgcgtgattgaagaaagtgagacgatattggtatcgggatcataacatattaacacgtataatcaatttttaaaactcaacacactttcaagtttcaagttgcatttaactatttaaaattaattatattaaaattagattccagtaatattacatacaaatgatgagtgcggctgcttctcgaaggacatttcattgttgtgtaaaagatgatttagaattgcgttttaactatcgttataatttatcgcccctaaacagacttttggttgttggtttaactaaacaaattccattcgtcatcgtcacttcatttttattatcttttggtgtttcggattttttttttgtttttattttataatcgttgatcgttgacatgtgccaccaaacacgcttaggcgtttaaataatgcttggtctacttcatcatattgcctcacccatggaccataaatcaaagaaaattagttgcatcatggccggtagcataaatttctataataattagcaatttttaattgaaaaataaatgaataattttaagagtgaaagtaaataataaattattgctaaaaattatattttgaatgtttaaatatggtcagtttaaaaatataaaaaagattccctaaaaaaaattagaaagtgaaaaaagttaagaacaagttataaagtccgtacattttcatcctaggttagttgttataagatctttaatatatcattaaaaaaacacaagtgacttaataggagtgaatcacatgtcttataaaaaattataatcttaactaattaaaaatgattttaaatataacttttaaaata

SEQ ID NO: 373 - DNA, 14252 bp, Glycine max
  source 1..14252: mol_type = genomic DNA
tttacactccagctctgcgagatcgtcaacgacgttgcaccgcacgccgacggcctccgatgttgtcgttggccgggtaacaccactctgataattataacgatgattccgattaagtttctctgccattttggaaatctagatatcaccataacagcattccacagtgaaacccaaagccaacaaacaagataaatacaacaaataaaagaaaagaaaaaaaaatgtgacatcaaaatcaacggttgccgccggtggaaggagcggatctcagatctggaatgaaaaattcaaaataaataaaggagtgaagcggtggagcagatctcacatacatttgaggaaataaaacccaaaaattgaaagagaggacaacagttgcagaggttgttttttaatttttttattaatttttctttcggttaaaaatttgttattacagttccgaacttcaccctagaaccctggttcacggtagaatttgccaccaaaataaataaataatattatttttttcctttaaaagctaaacgaatggatatacgtccttatccacataggaaaatagcacaagccaataaaattcgatattttgatccacacggtaggtctaaatcctgtttcggattattcatacgtgggcaaacttacaacatacacaccacctaggatttatgaccacaattaaggtacgaaaaatgagtatgtcacagtcacccaacactagcaaccactgagttcacccctcaaacgttaattaattacaaggcttatgtctattttcagtatttttgacatcttcgttctcctgatttttgttggctttaactttaaaccaccaattctgttccccttgtttcttcatcattagattttaagtgccatgcattgatataatataaatatataacttcatttaattaatgcaagctattgagttttgagtcgaatctattagccacaaaacacacacacacatattctcacacaaactgcaaccatggctactaccttatgttacaattctcttaacccttcaacaaccgttttctcaagaacccatttctcagttcccttgaataaagagcttccactggatgcttcaccttttgttgttggctataactgtggtgtaggatgcagaacaaggaagcaaaggaagaaagtgatgcatgtgaagtgtgcagtggtggaggctccaccaggtgtttcaccctcagcaaaagatgggaatggaaccaccccttcgaagaagcagcttcgtatacttgtggctggtggagggattggagggttggtttttgctttggctgcaaagagaaaggggtttgaggtgatggtgtttgagaaggacttgagtgctataagaggggagggacagtataggggtccaattcagattcagagcaatgctttggctgctttggaagctattgattcagaggttgctgatgaagttatgagagttggttgcatcactggtgatagaatcaatggacttgtagatggggtttctggttcttggtaagtttaaaggttaagtacatatttgaattgaatcagtgatttgattgtcttttttctttttctttttttctttcttgttctatttttaggcatgcaatagggatactcatgctgattggtttaatatatcatttaaggtgttggaccctcaaaagctaattaggtagtttcaaccttgtggtaagtggcaactgtactcatttttggcaaatttaggacagagaaattctagcaatgagaaaagtacatggttaagggaaaagagtatattaaattattaatatcaattgagaactttgagttgacaaacttcaatatcatgaccgttgcaagaagtgccctagtaaaaaaactgtgaaatcttaacaacagcagcagggagtcaaacgcaactgcaatggaaattcagatgtttaacaatgtttgtgtcagtggtcctagttaacaagtctattaacatcctgtttgttaatgagtttgattactcttagtgagtacatccttcattttaaagttgggggaacttgggcttaataggattctgtagaactaaactaaccaaataattattctagcaaacatgcaaatgggtgttctgttattgtaaattttcctttctttcacaaacaacaatcttatttccttactatcaagttataaaaaaaaatgttttcttctattttctgtatgaaattttagcatttggtaccgtgaattgatatataggttgttgtcaggtacgtcaagtttgatacattcactcctgcagtggaacgtgggcttcctgtcacaagagttattagtcgaatggttttacaagagatccttgctcgcgcagttggggaagatatcattatgaatgccagtaatgttgttaattttgtggatgatggaaacaaggtaattagagaaagattgttaaagattctcctcatatttctgtctattatgatatctattttctgatgcttttatttctttcttattgaaatttgaaaacgcattggcagacaaatatcatttgattgatgtttactactttcccaccctgcattccacaatttcaggtaacagtagagctagagaatggtcagaaatatgaaggagatgtcttggttggagcggatggaatatggtccaaggtcttattaatttttctctgattatgatcttattctttagcaaataatttttcccatatgaaagtaaacatcatactgaaacatgacaagtactgtggagctcatatgtgtgttagatttgttctttcattgtgaagtagtgaactctttctgtcattctgtctgtaagcggttcgtataatcataaattctgcatttaattttattgtaattttttatgaataggtgaggaagcagttatttgggctcacagaagctgtttactctggttatacttgttatactggcattgcagattttgtgcctgctgacattgaaactgttgggtatgttgattatattcatgtatcgtatctctatttatccattttctgtggactatgttgaaattttgtaaacattacttacattgagttgagaagcttacttgaacttcttcgctggaagataccgagtattcttgggacacaaacaatactttgtatcttcagatgttggtgcgggaaagatgcaatggtatgcatttcacaaagaacctcctggtggtgttgatgagcccaacggtatgcattctctttgtgtttgagatttgaaaacagttagaagcacaccctttgcaaatgttaaattttcaatgtggtctacttatagacatacctttttaattgtttgtgttggcttttacataactgatgccgttttttaattgattgtacctggaaagaattttcaactgttatggtaatgaataattgattatttgtttgacattttgagcttagatcatttctatgctgaggatcactgattattatgttctgccactagttactactaataatgaacaattagtgggggttatatatgaaaaacgaaaaaaaaaggtaaagaaagctgctcatggcatcatctatttgtcggaatagaaggtattttattcaccttgttattcttgagtcatttacacagtataaatagatacaagagagagagagagagagtttaggggttgtcctagcctatacatgatactgatggctaaatataactaaatttgacccttgatctaagggatttgacagctatttacaattaatgttcttattttctggtaattctaatgactcgcgctaacactctccctcaagttagtacataaatgtctttaatgtccaacttgtcaagggagtcagggaagttcttatcggacactacctttgtaagaatgtctgtcaattggtcttccgacttgacaaacggaaatcaaataatcttcttgtcaagattttgcttgatgaaatgtctatctacctccaggtgctttgtttgatcatgctggatagaattttgtgagatatcaattgtatctttattgtcagagaacaagttcatctccatgctaggaccaaagccaatctccattagtaaccttttgagccataatagttcacaaagtcctttggtcatgcccctaaacttagcttcagcactagacaaggccactactttttgctttttacttctttgtgtaactaaattcccttccacaaatgtgaagtatcttgatgtggattttctgtctataacattccttgcccaatttgcatcagtgtacccttcaacactcaagtgattattcttagagaacatcaacccctttcttggtgaggattttaaatagcgaagtatttagtttattgcatctgtatgttcttcacttggattatgcataaattggctcaccacacttacggcataggcaatatcaaggtgagtatgtgacaaatagataagtttccccaccaatttttggtatcttcctttattcatgtgcacttggtctgtgtattgagaaagtttgtgattttggattgttggagtatctgttggtttgcagtccagcagccccaccttagtcaataagtcaaacacctactttctttgatacaagaaaatgcctttttgtgaccttgccacctttttccccaaaaaaatacttgaagtccacccaaattcttcatctcaaactcagttgtcaattgctcttgtagtcttgaaatttcttcgatatcatctccaataataatcatgtcatctacgtaaataattacagttgtcacatttccttgcagatgctttaagaatagggtgtgatttgaattactttgatcaaaatcataccttctcatagttgagctaaatcttccaaaccatgatcgaggttattctttcaatccatatagtgcttgctctaacttgcataccaccttggttccagaagagggcatatagctcgatgggatatctatataaacatcttcttcaagatctccatggagaaaagcgttcttcacgtcaacctgaagtaatgaccaatctaaatttgttgcaagagataataggactctaacaatatttagcttggccaacggtgaaaaagtctctgtataatctataccttaagtctatgtgaacccttttgccactagccttgccttgtgccgatcaatggatccatcacttttgtatttgattgagaacacccatttgcaccccaatatcttctttaccttaggaagtggtatcaaccttcatgaattattgttttgtaaagcttccatttcctcttgtatggctagtgcccacttaggatcagctaaggtttcttccacattttttggaatatgacaggataataatgtctttatgaaggcatgaataggatttgataaatgttgagtagacacataatttgcaatggggtatttggatcgcctttcttctacattagggcagtatctattgggtggctttcctcgattgttcctgataggcaatacatatcttacagaagcattagtagatgaggagatagtaggagagcttacctcaggattgttccaagtgagagggtcgggtattatgaaaagagggggctcttgacttccttgatcgatatagtcttcattgacgggaacttcttcactagcagttccttcattagtagaaggatcctctttacactcaacttcagttatatttaaatgttgcatttctataggttcatcatggattactccttcaacttcagattcatgctctccaatttgtttcttttcaatagctggtgatggagccaccaagtaccaatttagctctctattcatggactccccttgaagagctgaattggataccataggagaaaagaaaggttcatattctagctaggaaagttacatccatggtgatataagttttttcgatggtagggtccaagcatttgtagcattttttgtgtagtccatagcccaaaaacaagcacctaacaacacatgcatcaagtttggtgcgttggtttttgtggagatgaacaaaaaccacacacacaaaaatcctaggttaaaacatcaacacagtaggtaattgtacatgagaagagagtacttgcagaggtgttttaaaatgcaagaccttggagggcatgcagttgaggaggtatacaactgcaattacagcatcatcccaatggtgagttggaacatgggtgcaaagaagaaaagcacgtgttgtctctaagatatgacgatttttttgttcggcgacactattttgttgtggagtttgtgagcatgaggtctcctgaaagagaccatgttgttgggattatgctttgaaatgatggttaacaaactccattatatgaccgaagaacttgaattttggttgaaaactgattttgaatcatgatatgaaaattctgaaatatttgaaacacctcatctttagtcttcattaagtaaagccatgtcattcgtgtgcaatcatcgacaaatattacgaaccaacggtgaccaaatacgatagtcctaagggaaggtccccacacatcaaaatgttttagagcaaaaggaacactgcttttattcaaactcatacggtaggaggttctatggcttttagccaaaatacaagtcacacatgtaaacctaacatttttcaaatgtaaaaataaatatggaaataagtgtcttaaataactgaatgatggatgtcccaaatgacgatgccacaaccatatttctcattctttgctactagattgatggcacacgtgatgtgcttctcctttgctaaaattgtctaggtagtatagcccccctctcttagtaccacgcccaataatcttcttgttgagaacatcctgaagaaggaaaaaaagtagagtacatcaataccacataattgagctcttcagttatttgactcatagacattaatttattagataatgtaggaacgaggaaagtgtgagataaagagactgagggtgataatgccacagttccaacacctacgattggctatgcaactctatttgcattcgcaatgcaagtcctatgtggtggagttgactgggagaagttcatgggatcaaaggtcatatggtttgttgccccagagtcaataatccatgcacttgcatcctgagagttagaactacagaaaacttgacgccagttacctggtttcattgaggtggaggaactagttacaggacaaagcgagagttgagactcaacagtgactacaacagctttaccagtgccttcctcaagtgtcgtggtgtcttttttcttcttagcttgcaactcatgccactattttggatacccatgtagcttgaaacaggtatcacgattgtgtctaacatttccacaacgtgtgcactttcctccatcagatggacccttcgacttcaagactgagttgtgtttcccagccactagtgttggcaattggccaaattttgaacctttagtggccataatagcatcacttgttgtattatctaccccagatgccattatagtctaacaagtgtcctcccttcgaacatgtgcataagcatgctcgattgtgggaaatggcttcagttggagtatgtcactccaaatgttatcgagttggtcatccaatccattgagaaagatataaactctttcctcttgtagtaaataattgtatttttgtatatctcttgggcactccatggcattagggcaccgaaagtctatctcacgccacagcccttgtagaacattgtaatatttttcaattaatccacttttctacgacatctgggttaccttacgtcgaaggttcctaaagttgtgaagtatcagatccatcaaaatatgtcatagcaatggagtcccaaacccctttggctgttgggaagcggatgaaattccccaccagtgagggatccattgagttgatcaaccatcctttcactatagcgttctcagttcgccatttacagaatgtcgaatcaatttccgacgacaaagggaatgatccgtcaatatatcacagtttgtctttgcctgagatgtacatctcagccacctgggaccatagggcatagttggaaccatccaacttgatcctgatcgatatcgtcgaggaattagagattgacagttgtgatgttgactaggcttttgacaaaacctccatcatttttgtcgtaagatttgccaaaatggaatcggtagcggaagcatttgatggctactttgtggaatcaccaatcgctgaggaatcaaccatctttgggtcccaataatatgctcttgataccatgtcagaacataaggtattttattcaccttgttattcctttgagtcatttacagagtataaatagatacaagagggagagagcttaggagttgtcctagcctatacacgatactcatggctaaatataagtaaatttgacccttgatctaagagatttgacagctatttacaattaatgttcttattttctggtaattctaatgactcacgctaacattttttagcatttcaggaagcatgcttcatacctacaaaatactgatacttgcatttgtttcatgtatcgatattagacatgtatctgatattgatacttttggatacttcaccaataataagtatcagaaaactatcaagtgttagatttaactaactacatcaaatctcaattttaaagtgggtcacatttttactagttttaggaagaaatgaagtagctactattcttgtttgtaggaaataggctatgatttatgatgactatgattcatagtttctattttgtttttagtaatgttcaaaaagtgtgcttttagtttgaatttgtagagtaacaatgttatattatgtttaatattttatgcacacatgtatgtgtatcttctacattacgtatctgacattaagaataattgtatcatatccaatatgtatccatgcatcatagtagttagcatggtatttatttgagattacctcatgattgctttttgttaatattcaaagatggacctaaatgcttctctcgcccattctatctcagactcatttccttctattactgaatctttatccatctttcttgacgtggaatagaatggattgtaaatatcaagcattcaagctggtataatgatgaagattgctaatgaaatagcctgggttctatgacagtaatttagcattggaaatgtagaaataagatgaccttgaaaatatacaaatagatgtgtatctttatttttcatccttttcaatgaggaaaaaaaagttaaattatcatattcatatctaatttcttagttctttctgcatggcaggaaaaaaggaaaggttgcttaggatatttgagggctggtgtgataatgctgtagatctgatacttgccacagaagaagaagcaattctaagacgagacatatatgacaggataccaacattgacatggggaaagggtcgcgtgactttgcttggtgattccgtccatgccatgcagccaaatatgggccaaggagggtgcatggctattgaggtatatattctttttatctggtatttagcttattcatcctctctcaatgaaatatgaagttattatgagttctacattagtttcagaaattttttacttactcagaccaggaatggatgcaagaattgactaatgatgggggtggagggggaatacacaagataaacgaaaattcttagtttaaacatatgtatcatacatgttatttcatataataaatttcatctatgattgagttagtgtcaaatttttaaacaaagcaatgaaagactatttgtaccatatgactattatatcctccaagtcttggattgtttacatactgtttactcatccaaaattacaataagaatccacttttcattgatgtgaatctatttaagcttcctctttaaatattctctttttacctgtgggtcttcttacttataaaataaaaataaaaaattgttataaattataatgtattagcccattaaacacaaacttatcaaaactgattgtagaggctatttttgttttgcattaaaatttgattacctgtaatataaaatggaaatgtaataaggtcaatagggagactcctcggctctctctacctttgtccctctttcatacctaagacattatcactgattttctggactttggtatttgaaactttttcttaactttcttgtcgttaagctttctattattttttttcttggcacagctttcaaataaacaattttatttccatctgtctgatggatatacactatttacagaaacatacataaaattaaaatatttcctactttaagaggagatggagataatagatgtcaaactatctcaacttttgttagaggctcgaaagggactggtaatcaatgaaacacttgaaaagtgaggcaaaaactccttctgactagtttgttttatcatttcaggacagttatcaacttgcatgggagttggagaatgcatgggaacaaagtattaaatcagggagtccaattgacattgattcttccctaaggaggtaatataccattttgcatttatgcaaatgcaaatgatgatattattgacttgattcgaaaagagagatcgtttcttgcatcaaccatggctcaatagttaatgtttcattattggtttaaatacatttttgtttcttggaatttagtgatcttttgtttttcgttcttgtaaaaaaaaaaaaaatttcagtcattgtaaattatattatttttttgtttttagtctgtaaaatattttagatgacgttttgaacaataaaaaatgttatataaagtattataaggacgaaaaacaaatataatttgtaatgactaaaaaataattttttacaagaataaaaaaaaacgctaaattatcatgactgaaaagatatttaagcattcatcattttcaaattggtaaatttgatgataaatctctttggtgattaatggtgcccatcttttttatcccttttgcattaatactttcagctacgagagagaaagaagactacgagttgccattattcatggaatggctagaatggcggctctcatggcttccacttacaaggcatatctgggtgttggtcttggccctttagaagtaagaacttaaaatttatcaataagagaatgaaaaatatggtgaaatgacactcaaattgaaataattaaatgcacaaattcattcttgcttcccttactctgcagtttttgactaagtttcgtataccacatcctggaagagttggaggaaggttttttgttgacatcatgatgccttctatgttgagctgggtcttaggtggcaataggtaacgtttagagcctatttttctttgctcatagtctttctttcatattgtcttcatctgatcttcttattcacatgcatgtagaaatctgagccactggataaatgatgagaactaagaagttcaagaaattgataattgaaaacaatgtttagtctttacttggacaaacaataaagaaatatttatgtgtgcaattttgttactaacaacatgaaaaatgatgctacttttgcagcgacaaacttgagggcagaccactaagttgcaggctcacagacaaagtacgttgctcaaataaagtttcttttgtactttgttgctgagaagatattgtatatctggtaatttatatgttcacatctattagacttgttgtgatgttgttgttaatagctatttgattatttatgaaggcaaatgatcagttacgtagatggtttgaagatgatgaagcactcgagcgtgctattaatggagagtatgtctctgaccaaatatttgtatcacctattacatatttcttaccacaaataagtagatcacataacttaatgttcatccttgttttctcaattatagatggattttattaccgcatggagatggaacaggtctttcaaagcctatatctttaagtcgaaatgagatgaaacccttcataatcgggtatgcctattgctacacctacttacaatgcagtggcttaatagttcttaattatcataaagataatctaatttttggtcaccaattagtgttgagaagtgtgcagttcaattcctaattatcataaagataatctaattttcactttcagcctattttctaatatgtttttgtaattgtaggagtgcaccaatgcaagataattcaggcagttcagttacaatttcttcaccacaggtagcacaaatttatcattacctgaatgaaacacggtcccatacttgatgtgcttcacatcattaacataatcaacaatttctctttttaaggtttctccaacgcatgctcgaattaactataaggatggtgccttcttcttgattgatttacggagtgagcatggcacctggatcattgagtaagtaaaagaagtgaaaggttctttgtttgacattaaaagttttaaattcttgagaaatctatttaatatcattctcattatgttttcagcaacgaaggaaagcagtaccgggtacctcctaattatcctgctcgcatccgtccatctgatgttattcagtttggttctgagaaggtgagatgagaggtcctaaaaagcagttgcagtatactcatgttacacatttgcatcttctaggacttatattaggtatatgaggtaaccactgatcaacatatgagaaagatactacaactgtttgattcactaattatgactagtttctttcacagcctataagaattgaacattattagttggatgattcagtctcattgagtagtgttacttgtacacactttcatcccacactcaattgtttaaagtaaaattattagtttattgcattgtttaaccaataccgaaatttcagttgttaattttatttaaatacttgtgggagaggtgctaaaaaattattcaagttacatttgatttcacaattcccctcatttatctgagacaaatgattcacagacataatcttttgcgtatattatctgttatccttgcctgaaaatgttcaattttagtttaaatggtgcactacttatttgatgtctcagcaaccaagttatgtgcaggtttcgttccgtgttaaggtgacaagctctgttccaagagtctcagaaaatgaaagcacactagctttgcagggagtatgactgattctgctcaattgcaatttgtaagttatggaaaaattatacagcacaaatttgctattgtatagtactatctgcattgttttagggtggggtattataccacagtctagtcatttaagatctgatatgttacatgcctatatggacatttaagagggactcttgggtataaatttgttactccactccaatactttttgtgtatgacatttgtaatttgttagagttagatttataacatgacacacataaacttgcacgtgattaatgttgaatggagtaagcaatgcctagctatgaatttttgcacttttaattgtgatttacagaatcaaactgtatagtttatcattataagaagagcaaattcaattgtcaccaaatttaacagatatagttcaattggttgaacatgtgagttgttgtaaacttcgtgtgacctaattttgattcctacaaatcaaaaaaaaaaaattgtcatcaatctctttctaactcctcctgagtgatctgagttctgtttattattgctcctcgtatgttgtaaccaagttttgatggtaatttttcctaacattacaaacgaggatgcaaatatctcatatctatattagacaaagaaatgtagttactagcatcttagcttaggtgagaattgtcattgtatgtcttgtcgttgtgtccattgtccagcatcaattttcacatataaaacaagaaaaaaaaaacacaaaatttgttctatagtaggctgacttgttcacgccattcatgttgttcattccaatatgggagatattgatggaaccatactatgagagaagcaaatcaacctgcggatgaaggtgtttaccatatttttgcttttgctcttgattttatattgcctgctttaagagctgatatggctcaagtttgtttttctagagtcttctagtgctctttcttttgatgtaattcacccaaaaaaaaaaaaaatagtaggccaacttgttgt

SEQ ID NO: 374 - DNA, 3612 bp, Glycine max
  source 1..3612: mol_type = genomic DNA
ccacggatcagagcaggcccataaactgccaatctaggcctgatccatcttcaggccctgcttattggacttttaaataaactagttatcttttttttttttttggtgaagtcgtttataaattttatatattcaatccgtccagtgtccagattgagttttcagtttttacttcagacgcgtctaaaataataagaaaaagtgaggagggtttgcatgagtggaacatttcacaagtataattgtcattgaaatagatctagttacaattacaaaactatgattaagttgataaatgaagctttcattttttttcctaaccctcaaattcatcacgaaaatgatccactaatttagtgttcagttaagaaataaataaaatcaaacaaaaaattattttcaccaaagctcaaataatattcgaataaaaaaaactttcatatgaattattctatccaaaacgatgtgttttaaaatcctgaactatttgtattatttccttacccataataatatattttcacgtgcattaacctttattttagagaaattttttatcctacgataattaattaatatttttttactaggaactaggaatatccattgcacttgcttgacgtgtcaattcaggatttgtcgagtcgagattttcttgtccaatcctcctaccagctagtgactaacttgcacgttcagattctggaccgcataaaaccccagttagaatttggaagaatctagacacatcccttgtcctaattattaagctgccattgcttttaaaaaactccagcttgatttatgtttttattttcttttttaagaaaatgtaaactaaaccgaagaaattaaaatagagagaaagaaatccaatagagtgagtgagtgtactaactactaagtttgaggcatgaaatgaaaggacccaaatattatttcatcataatacttcaaattaaaacattatcaccatacccacaaatagtgtgggagacgtggtcactctagttgcctgtcatcaactattacaccacatccacacccttgttaacttaaagatgttattcccattctatcacattttggtaatctcttaacatatagaacactaccctgaacatagtaaagaagccagtgctaggatttgttagtgaagcaatggctcaaaccatgttgctcatgtctagtgtctctagcagttattccgtggatttgaagaaagaccttttcctccaattgcagagtcaaagtttaaggcctaagttctctcagctctcattcaacccacttccatcatcaacttcttccttttcttcaccccgtacattcacaactctggccctcttcaaatctaagaccaaagccgctcctgctaagactaaggtactctttttccatattttataaaaggaaacttgtgtctaatctaataatgcttcatttttcagcacactgaatttggtttcacgatatattgcaggttacaaagccaaagcaaaaggttgaagatggtatctttggcacttctggaggatttggttttactaagcagaacgagctctttgtgggtcgtgttgctatgcttggttttgcagtgagtaaatcttagcttataaactccttaattatcacatcacaggagaattgagcgtatttgattagttcggaagatttataaaaatatactcttttaaatcaagttgattttgaatttgcaccacaagcattaacaaaatgttgcattaatttgcaggcatcactgttgggtgaaggaataactgggaaaggaattctagcacaattgaatctggaaactggaattcccctttatgaagcggagcctcttcttctgtttttcatcctcttcaccctgctaggagccattggaggtttaggtgaccgtggaaaatttgttgatgacgaacctactactggaggtgttattcctccaggcaaaggcttcagggaagctcttggtcttggttcaggtacttaaatttttaatttcttaactttataaaagagtagtgattagtagttaagtctaaatgaatgtgtttatatacaattatcaatatgtaattgtaatactaatagctaaatgtgtctcacaaattattaataatatcataaaaatcttattgaaatgtctaagtagcataaagttgctttttaatactatatatacatcatcatagtctaaattggttacatttttcataatataaaacttgggttttggcatttttcaggtcctttatttggattcacgaaagcaaacgagctatttgtgggaagattggctcaattgggtttcgttttctcattgattggagaaattataaccggaaagggagcactagcccaactcaacattgagactggggtaccaatcaacgaaatcgagcccctagtgttgttcaatgttcttttcttcttcattgctgctttgaatcctggaactggcaaattcgttacagatgagggggaggatgattagacactaacccttttgtttgtttgtgtttaaacaaatactcgtttgctcatctatcataaaatgcattgagttcatcataaacaacaaatctatatgatttttctccatagttgcacgcgtcatgattagacattattttttgctttggtaaattaaaatcatagtgcttcgatttgccagtaaaaaatcataatggaactcaaattagaacgcccatgttctatataaaatctaatggggtaaatgaaatgagatatcattccgcgtgattgaagaaagtgagaagatattagtattgggatcataatacgtataatcaatttttaatgttaaacccactttcaagttgcatttaactattcaaaattaattagtatattaaaattagattccagtaatattgcatgtccagtgaggagtgtggctgcttctggaaggacatttcgttgtataatagatgatttagaattgccttttaattaactttataatttatcgcccataaacagacttatgaaaacggacttttggaagttgttccgttagtcatcgttatactattcgttgatcgttgacccggcggtatctacttcatatacacgtgtcaccaaacaggcttacttgggagttgggagtttactattgcctttgtgtcggcgcaacatgacaacatggtttttttaccatttggtaatttttttcaaaattatcaaacggagacgtttttgaattaataaaccatttaggatacttgctaaaagtagttacgatcttctaatcacaagttataaatctttatataatttcaattttaaaagatatggtattatagttagaagtcatataaagatttataatttttatttataaagtcataattatttttatgactgatctttaaataagaattaattaaaaaatatttctatttgataatttaaaactcataataaaaaaaagtttgataacacagaatattattagataatagtatttttttcttcttctttgttttgactttcgacgtactagatataaaataatgtttggtctacttcctcttatagcctcacccatggaccataaataaaagaaaattagttgcatca

SEQ ID NO: 375 - DNA, 8043 bp, Glycine max
  source 1..8043: mol_type = genomic DNA
cccgtttgcacagaattcatagactaaatatctctcatccccttctatgcagcatccaaagaggcaaaccaggttaggatggcgaagccttgaaagaccttcaacttctcgagtgaaagactcagaggtgttactctttgttaaatgcttgatggccacgagttgaccacttgggagaatacctctatacacctgccctgcactcccacgtccaaggcatatcttttcaccgccataattcatggcattctcaatttcccttttgcagaaccagtacaatccagaccacgcagcgatctctttcaagtttgcctgtctacgaagcttcttcttggacaaacgttttaccattataaccacaagcaatattgcaaggataactaccggcacactcaacaaggatttccacaatgatcctggggacccgaaaattgacattttttttgtcagtttcatttggctcaattctaaaacaaaaatgtttagaacttgaaaaaaataaaaaaaataaaatggtggagatggagctgaatactcttgtctgatccagaagctgaaggtggcaagcagcgtaagactttgtcaacggcaggatcatttggtttcccagctgcaacagcaacaatagctgctaccgcacatatggctacctcagtgtggttgttgttgttgttggtcacttgattatataaactatctcttaagcttaatattgcaccggtgcaatctgcacaagattcaccaaatgggtggtcgaagttggagcacttgtctaatgcatcttggtactgttgcagtttcctaacatcctggaaaacgaggttggagcatttggaactgccaaggtacaagctttgaaagccgcatgaattaagggacattccttgctgcgggtgaaatgtcttggcacaactctgcgactaatcttgggaaatgaacacttgtcctcctgagttcaggggttgcgatgccaacgcattcgacaaaaccgtcagagcatttcgacagcacaaggttgtcgggaacccatcgtcaccccacttgtctaaaacctcattcacatcgccgcactcaccaaatgccacatattgggacgtgttgaacttcagcacacatgtacctgcaccacagcaccagtaagttggtgcaaactactcaaactctattatattgtatggtctaatctaattttgagttttctcagtgttattgctatggactatatatcaccaactttaataagcttttggttgtatttctagataatatatttatgaacatattctctgtcacacttcttttaccataatcgattgaaaactataaaattacataacagacttgctagataagataattgagattcattttaataaataataataaagagtacaatgatatatgcataacataaaatgtgtaacttattaaaggataaaattaaacgctaatatactagaaaagagtaggcattgcatgaaagaagagggaagagaaatggatttgaccttgtggaggatcattgggtgctggcgatacgagtggggaaaactctgcaggtgttgctaggaataaaaatgcaaacgaaaggtaccaaggtaaatgggtttttattttcatgtccaaaccaaaggtctattacccgccacagaagttaaattaacccattgtgaagcagcgtaacgttgatggcagagcaaccaaattttttccgtgagatgagcggaatagagcagatatagtgtcatttttcctcgtgaattccgttaggggtgtggatattcccgcttacatactgccctcagattacagcttgtgttttatgccttgctataatcactaaatcttatataagttataacatttcacatttttaaatgatattctttttatgccccttggccaactatccatggcttagattgaataatagttctattacactgttaagtattcaaaatgcatttgagtttttatcttacttttaaaaattaattgtcaccttgtttatgtattttagggaaagcattttcttagctgtacaataacatcgcaattaccacaacaatactgctgtattcattatcacaagcagcttagtatttctgccttatccatttatcctatcgtgttttatcatgactttgtttactatgatgcaggtacttcaggttttttttttaaaaaaaaacagtaaatactttttctaacacacttaagagagtaaatgaacaaaatgcatcgtcaattatagcccaacaagttatcaatgaaccaaaattacaaaaggaaaaaaaggatttagccatcaataattgttaaatatgttgcactcttgattagctttttgttttaaccttgtttccgtgtaattttcgcatatgataaatgttactaatacactctttaaaacacttattttaattaacacgttctttgttattaatagttaaaatttgttgaaaattataaaattataattggagattataaaatatgaagtgagagacacaaaaatttatagtttttaataaatttcagtcaagtcaaaataatatgttcattgtattgaaaaaaaacaaagaaatatcatgcatttaaaagaatgtattaaagattgttttattagcatttatctttcaactttctttttgttttgtaagcaactatgttttgtattttatcatctcaattctctcttttgatacaagaggaatcagattttttgtttctctctgttttatttgtcagcatgtcattggtacctatttgatcactaaaatcacttttagtgatgatgtatgcttccttccaaagtttaacatttttttctattctctattattcatatttctgtctattaaataagtttaatgaaaaaaggaaaaactcaaagtaaatgtgtttaagtataattccttttttcagttaaaaaaaagtataattccttttttttctttatatatcttagaccgaaattccttaccgccaaatttctgaaatttactagggtgagttcctttttttatcagtaatattttattgaagagatatacttataaatataaaatcccttgttttatcaggacaataatagtattttattgaagagatataatcataaaatgaaaaataagaaagaaggttttagttctgatgattttcatttttgttttgtactagtattgtgaagtgggccttgacagaaggtattggacttggaaatgttgagtccatttaaaaggaaattggaagcaagttgaagcgtcaacgtgtctgctgtggttgcagtgacgggtctgtttgcagtccacacgaacaccatcatcattatgttcttatctcactcatgcgatggcgactcttgtttcttcttcttcctcttccttttacatttccttattctatttctcattgtacctgcaattggcctcttctacgttgcaaggcatgtttcccactttgctcattctaaaccatatctctgctcttaattactattattatcatattagcatactatatataatctaaattttggaacttgactaataaaaacaagtgggtatgcaatatcctaggacaattatattttccttttatgttagattttttaacataccattctaaatgatatgcagttgatcttgctgatttgtttttgacagtatcaggttacatttggaggtgaggacatacatatacatatattattattattgttactattattattaggttatatgtatatatggcaatgtggggtggacactcaatgttgttaaccaatggggaaggcacaggcactcccaatgtacgtataaaagcaggccttacggttagaggtgatttaaggtttcacagaacagcagggtttaaatatggtcctagtgtggtagtgctcaaagttttttccaccgccaaaaggccaacacgcttgcgcttgataagaccttattgcagtttgaggggacaacacaaccaagggaaaggatattcttctctcacttctacacaaaaaccacgggtaagcaactgctgcttagtttatcctacttcattgttcatgcaatcatgcttaccccttgtgtgaaaatgcaaatttttttcctaagatgacacctttatatccaatgtccatcttctgagtttactttacaccttgtttggatagcaactgatgttgaaattcgaggcagatcgaatgcttgtttttctcaaagattggagtaatatacgcatcacggcagtagctgccatattggtatccattttaatgatcattccaccagctgatgctgttgatgctctcaaaacttgtgcttgcttgttgaaggattgcaggtatgccatctttctttatcttgtccttgttctgccatgacaacatattatggcctccaatttcatactcttttgtccatgcaggatagaactagctaagtgtctttcaaacccatcttgtgcggccaatatcgcttgtcttcaaacttgcaacaatagacctgatgaaaccgaatgccaagttagtcttatgctttacatcaatttcatgcccgcaccattattcatgtctccaaaccctgcttatgaagcttctttttcttcttaactttttcagattaagtgtggggacctgttcgaaaatagtgtggttgatgaattcaatgagtgtgcagtctcacggaagaaatgtgtacctaagaagtctgatgtgggagaatttcctgctccaaatcctgatgtccttgttaatagctttaacattgctgatttcagtggcaagtggttcatcactagtggcttgaatcctaccttcgatacctttgactgccaattacatgaatttcacacagaatccaacaaacttgtgggtaatttgtcatggagaatacggactccagatgctggatttattactaggtctgctgagcagagatttgtacaagatccttcctatcctgggatcctttacaatcatgacaatgagtaccttcactatcaagatgactggtaatttcttactcgtaagctctcttttcaattgcaactacattggcgtgagggttgtgctagagccaaaataaaactagcttcctacttacttgtagagtaaagttgtagtgtaattaaggcacagaccaaatcgagtttcttaattaagttaggagagttagaaaagggtattttgatcattatcaggagataaaaaaatcagcaaacttgaataaaatgttattggtttgaagctcaacttaagaaattcacacacatggtaggattcatcacaaatcactatactgattctagatccaatcactgttaatggtttaattgtctactggaaaacaccctctgattcagtcaatgaatgacaacaccaatgttaaggtccagttgattccaatttaatcagaccacaaattcgttagtctagcctctaaacaaaattctgaaataaatttcaaaatttaatctgatttagttcaggcataatcatgcttgtaaacagatttgtaaaagaaggggaagtttgaatccaaaatagaattgagaacaagtctcagaatccacatcattagcttcctataacaatcaccaatggagaaactaaaaatgcataaaacgcaaacaaggagggaaaacctcgaatctgaaaggtcacaactacacaaatgatccaagtctattttcacattatgtttttcctcgtttataactaattctttcctaatcccaagattacccttatcccaactattagcccatggagtaagcttttcgacgatatctcatttacctaatttgggattaaattaaatgatatacgctcaaagacaaaagatatgtcatgcatgcatgcccaatacctctggtctaactctagctgaattttaacactgaaatgcccgaattggtcctttttacaaagtttgtagatctctttattaactttactagcacataaagaacatcataattagagatttatagcttaagttatgaccaaaatgcttttggcccaataattcaaattagtggtaggactaatcaatcaagaccaaaacctcataaacaaggtagttaaatgttactttccaagatcagaaaaagaatacaacatgttgttccttttacgtgtgcctacattaaatcatttcacatttgcaatatatttggattcaagagtcttatgttaacattagaagacttgcaaacaatgatacatacatatatatatatatatatgtaggtatattttgtcatccaagattgagaataagccagatgactacgtatttgtatactaccgaggcagaaatgatgcatgggatggttatggaggtgctgttatatacacaagaagtgcagttttgcctgaatctatagttcctgaacttgaaaaagcagctaagagtgtgggaagagactttagcacgttcatcaggacagataacacatgcgggccagagccttccctggtggaaaggctggagaaaaaggtagaggaaggagaagagaccattgtaagggaagttgaacagttagaagaagaggtggagaaggtggggaaaacggaggccaccttgtttcagaaattggcagaagggttcaaagtattccaagaagatgaggagaatttcttaagagggttatcaaaagaagaaatggagattcttgatgggctcaaaatggaagccggtgaagtagaaaagctctttggacgtgccttgccgataaggaaactaagataagcctgagaaccatgtccaagataacttgacatcataatctttttgatcatcttaaatttatctttgcttttattcattgactatatatattgcatggctttagaaatctttcctccctaatcattgcttttatgctgacatactaataattattcaaatattacgtaacagcttttatcaattgttgtatatatattcagagtattgtatttgcataggtttagatgcctgtgctctttttcagttgaaaatatttggattgggaattccgacatgaggaatgctgtattctaccagtgttcttcttcaactactaatgcataaccaccaatcatattaatcattgaaataaagcattcactaatttttatcagtatggtgttttataataaaaaaaagaagagttattcatacaacagttcaataatttatacaaacattttacctttatcttttctctcgtcacatcatttattacatctcatatttttctctcttttctctatttatcactcaattgtaagtacaatttgttgctcaatttatcatataatttattgtacaaataatatttctctgtagaagcatagtaaaacttttctttttagaatgacttgtgatgcggtagatgagacatcagttttctccattttcttttctggtagtatgctacgtgtctgagttcatttttctggaagaagtaaaatattgttgacagtacatatgaatttatagaaatgcatgggttgttcaactccgtaacacatggaccacaaaggaagagtcaatccaaagcaattgtcatgggcctaaactccaaattatcctagttagagccagtcagtgtcaaacaatggataggaattaggatggtggagtggagctttaacaaaagaaagggataatatcaatatggtagaggccctcaaatttccattgtccctgaagccaagtcatcaattatttctataaatgtaaaaaaatggaaaattagatagtatttgcacatttaaaatacttttagaattgaacaatcaatacggttataaaagtgaaaagtaactattttaagttaatatgcaataaccaatcttttattataaatgaaagacaacatttttcaatcagatgccattttttaaatcaaagagagagcagaacaatttcaaccagcaagaaacgtgagaggtgaacttaagtgccagtcgggtgtttaagatataatgcattttccttttcggatgattagatatttaatgcattttaaacggtgggacaaatctttcgt

SEQ ID NO: 376 - DNA, 9575 bp, Glycine max
  source 1..9575: mol_type = genomic DNA
aacattgaaacatttgattataaggaaaatccaaaaaaaaaaaataagaaggaaaatatttaaatatgttaaatgaattttgtaccttttttaattgataaagttaatgcaaaatcaaatacatttattatggcgacaaaatattaattatttctcaacagtttcctcaatgtacatattattaaattaccgcagatcaaattaaatccttgaatcattattaatttcactataaactatactcctttctttttataataagtgttatcccaacaaattatttctaagtgttatatttaaatttttaatataacattaattattatttttcagtaatatttataataaatatcattttagtttttgaatttaatcttaatacaattcttttttatctattttataaaattattattgtcttatgtctattcattaattcttattaatacgtgtaaaacaacatataccacttcttttgcgacgggagtagttgttattaatcaaaatgttatgtgacaattgacaaataacttgaattattttaatctggcggtgggtatcgatctatcagatgattgttatgtgggtgagcttataggatagagccacctgtaccacaattctggttccaaaatccaaaatctctgtcaagtcatttgaacccagccaataccaaattgccactgagttatcccacaaagtgccacatggctttgcgttttccatctttggtgaatgccaaacattttctgttctgtctctaaccccaaaaacgctgcaacaaatcaccacctttcccttcctttttcccccccttattagtgcctgcttctcttcttttttatattcatgcatatcatacgccttcacttcctcaacttcaagcaatgatctaatctttcactttttgcattccttcccttctcttgttgactttctgttgttagcttttcatcactcaatggctcctaccttgacatgcaactctttcaatcactcaatggcagttttctcaaaaacccatttctcaattcccatgttgaaagagctttcactggatacttcaccttgtgtcagtcatggaagcagaacaacaaagcaaaggaacacactgatgccaatcaaagcatcagtggcagaggttccccctgctgttaggaaaactgtggatgaaaatgaaggaggaggggatggtgcctctcagaagaagaagctcagggtacttgtggctggtggagggattggtggcttggtgtttgctttggctgcaaagaggaaagggtttgaagtggtggtgtttgagaaggatatgagtgctataagaggggaggggcagtataggggtccaattcagatacaaagcaatgctttggctgctttggaagctatagatttggaggttgctgaagaagttttgagagttggttgtatcacgggtgataggatcaatgggcttgtggatgggatttctggttcttggtaagttttaatttgaaacttgtacggtttcttctaattgttaatgttttggcatgggatacctgactggttttagtttatgatttatagatttgggtactaatagaccataaaaaaccaaattatttagcttcaacttactactgtgttgtgtgttcatccaagcgtcttgtttggtgacaatgttgtggtaaaacagaaactttaaaatttgactgcatcaaatgaatggttggcttattcagaggtgccactgcagcacaaattgggataattatgctattgtttctagtaaaaaactaatactaacatgttttccagtgggattgattaaaatatttagtctttatacattgcatgagtctggttaacatgtattttctgtttcatttgccacaaactacacttgaaaaatttgttcaatactctttgagataattcaggggtttggtgtagttgtgacaacctattagaagtgctagatagtaagttccacgcaagaactgaagtaattgcaggcagaatgataaagaaacctcacccgatgagtatattcatttagcgtcttaaaaataggataaagcaggttgcacaatatatatgcacagggttgttcttttagtgtaaagcagtactatttctttctcaaataggaatcttgcttcctaaatattttatatagttgaagacattttttaaggtttactttatgaaatttttagcatgtactatgcctaccatgaattgatacatagtttggtattaggtacatcaagtttgatacattcactcctgcagcagagcgtgggcttccagtcactagagttattagtcgaatggctttacaagaaattcttgctcatgcagttggggaagatgtcattatgaatgacagtaatgttgttgattttgttgatcatggagacaaggtaattaattaaagaaagcttttaagttgaagattctccctgtattgctatcatatgtattttttgaagactttctttcttcaagaacctgcaatggcagactaacgtgactaaacattgtttggtttatcacttgtgtcatcctgcatttctcaattgcaggtaacagtggagctggagaatggtcagaaatatgatggagatctattggttggagcagatgggatatggtccaaggtcattttaaattctcttggattccaagctttttgtttagcaaattatctttcccttgaagaaatgaatatttacttaacggagtgcatccgtgtaatttataaagtttcttatggtagaattatccttctaaaaaaagttggccatattacatttgatgtgtgtgtgtgcatgtgatgatgtgaatttgtttttcagctttgttcttcaaatgctgaactctttgtcatttggtttgttgagagcctttatggtcacaagtcataagtactgtttgttaacataatcttaaatggtatcattctgtgaataggtgaggaaaaagttatttggccaaacagaagctacttactctggctatacttgttacactggtattgcagattttgtgcctgcggacattgaatctgttgggtaagttggctgtgttcatgtcttgtatgcctatttatccatatttactggccttttttttgttactactacctttatcatgttgagaagcttacttaaatttccctactggaaggtaccgagtattcttaggacataaacaatactttgtatcttcggatgttggtgctggaaagatgcaatggtatggatttcaccaagaacctgctggtggtgctgatatccccaatggtaagtgatcttattgtgtttgagatttgatatctgtcagagcacagcctctacggatgttaagtattcttggtgctcctcttataaacaaggcataatatttgaatgaaaaaggctaacaacatactctttaaaatattcttgagactagagagtattattgtaagttcacactggtaattgaacttacaataaagagtattattaagaataactgtaaggtattcttaggaacatacaataaagaatactctctaaaatatctaaaattattaggaataatctttaggtattgtaagttcttaggactccacactcgtaattgaactaataaaggtactgataaaagtttgatggtccaactttggttgaatacagtaattgtggcactggacatatagaaatttgatgagaaaaaaagaagaaatatatctttatttttttcatgattgcctatctttatcatatctaactcttgaattctttctacatggcaggaaaaaaggaaagattgcttaagatattcaagggttggtgtgataacgtaattgatttgatacatgccacagaagaagaggcaattcttcgacgagacatatatgacaggacgccaacatttacatggggaaagggccatgtcaccttgcttggtgattctatccatgccatgcagccaaatatgggccaaggaggatgcatggctattgaggtataattgatatgttcttacatatttgttgtaaaattagcatttcataaattcttgacaacttaccttgtaccatacccaacaacttaccctaaaacttcatgaggtctatatattccttttcatcatttttttcctgtctattcttcccctactcagtgaaatatgaatttatttttgttctaacttcagcagtttcatacatatccaaacctaataaagttgtccaagttttctgggcttaggtattttagaattcagactttttctttttctttataattgtttaaacaactttttttttaccactgaaagacatatgcagaactaacccaaaaaaatgcataaaaatgaaaatattccttacttgtggatgaaatggacgtcaacaaagttaaactatctatgagactctcaaatgatgtggtgaagagcctttctaactaacttcttttttcattacaggacagttatcaacttgcattagagttggacaatgcatggcaacaaagtatcaaatcaggctctccaattgacattgattcttccttaaagaggtaaccaaacattcagctctcaaacatgctaatgaatgctgaattcgaatctaaagctacctactttataacaagtaccaaaattttggaactcatgagaggtaggcaaaacactaagaaatgttcatatcaaataatataaaaattaatgaagttggggacttgatatgaacagagagatgcttgcatatctcagccaatagtacagtagtaaatctgacatcattagcaaattggttatttgattataaatcttttttgatgactcatattacctgtatcttgctccctttccattgttgctttaagctatgagagagaaagaagattaagagttgccattgttcatggaatggctagaatggcagctatgatggcttccacctacaaggcatatcttggtgttggtcttgggccattagaggtagggactttagttttaaaaatgagatactgaagaatatagtgaaggtgacacctgtccacaaattcatggttgctttcatttgcagtttttgaccaagtttcggataccacatcctggaagagttggaggaaggttttttattgacaagatgatgcctttgatgttgaactgggtattaggtggcaataggtaatgatgaaaacccacatttaagatgcatgctttataactttcattatgaattactgaagttgttatacctggcagtattcttactccactcatttaagatgcatgttagaaatttgtgcaattttacttccatcatttacatgaaaatcggtgctactttgcagctccaaacttgaaggcagaccagtatgttgcaggctctcagacaaagtatgttgctcaaaatacagttacttttgcactttgttactaagaaatggtaactggtcttttattggtcatgtctgttagattttgttgtgatctagatatatttggtttgattttttatgaaggcaaacgaccagttacacagatggtttgaagacaatgatgcacttgagcgtgccattaatggagagtatgtctatggcccaatatgaatgaatatcatccttaggatgttgcaatccgtatctatgaatcacataactgttgtgtccatccatctgtaatttataggtggattttattaccatgtggagatgaagcaggtcctacaaaacctatatgtctaactcaagatgagatgaaaccctgcataatcgggtacgccttcagttgctcccacttacaatgtagttacataatcacatattctgatattgtatctattatgcaacacagtaaattctcaaaagttatatgtatcaccacacaagttcttcaaaaactttggtcaccaacttcgtctttcgaaaatcctttttgtaaccatcttagttcttaaaatttatgttatcaaattagtctatgaattatttaatttaatttttcatcacattagtctctcggtttttttcccccaccactttagttctgtatttttttttatcattgagggattaatttgtcacaaattaaatctttaagaaacttatatggcaacactttaaatcttcgaaaaactaatatgctgactaaattttttgaagtactcatgtggcaacacatgtgatgttgaaggattaaattgaggattcgttctatgaaatgaattttaacttaaagagaaagtgttgagaaatcatttgaattttttttatattcaatttaatgaaaatcttaagcacctgtcagattttggatgtatctttaaaagacaacagagttcttctcgctcaccagttattgttcactgtgttcattctcaattatcacaaaatcttttttttttggaataatacataaataagtccttgaaattacaaaattgtcattttagtgcctgaaattactacatgacggtcattttggttcccaacattacaaagacggtcatttgagttcctaaaatcgtaaatataaggaataatgattaatgtttgttaattttaggggagtagaacaaaatgtttgtaatttcagagattaaattaaccagtgctcataattgtagggactaatttagtgtgttatccttcttctttcgctctcaatccatgcttttgacacattatcgtgattgcaggagcatgcagcaaaaagatcatccaggcagttcaattataatacctttaccccaggtaacgaaatttatcatgagctgaactttacttggtttaacacataatggtcttcaacatcatgcaacaaagtttctattttaaaggtttctcaaatgcatgcaagaattaactataaggatggcgccttcttcttgactgatttgaggagtctacatggcacctggatcacagagtaagtaaaagaaatgtcaggctaatatttattctaagtttaaattcttgaaaatgtatatttaatttctctttcatcatattttcagcaatgaaggaagacggtacagggtgcctccaaattatcctgctcgcgtccgtccatctgatgtggttgagtttggttctgataaggtaatagactatccctatagaaaaaatactttcaatatacacatataggacattttgagaattaaagcttataaattataataggtgcctgcttataagaggaaagggtaacgaaacctttgactgcactaaatacaacaaagttttatacttagcgaaagcttaatcatggttaattcaggtgccgtagtcctgaaaacagcataacatgtaaataattgaacgttcttaggcctctacaaatcgattactggtacaggttaggtacacttggttggaaaaaaaaaattgtatgtggcttgaatacgactcaagtaagactacgtgtgacttgggctatacctagtatatgccttagggtggcttgacagttacgtatgccttggggtatagctagtatttccttattctcccctttctttcctcataatcaaacacagtgttaatgatggtaaattcagatgtaatagtactggaaacagcatgacatgtaaataattgaacattcttgtaacctacaaacatttaggttaggccactacatattaagtactggtacacgttaggtacacttgggtacttaccaggatgatttaaaaataaaaaataaaaaattctacttcgctgggatcctgtttgttagtaagagtaccgagtaattggagggtcattgtccttgtatagagttgaacaatgggctactcacattctgacatgcctaactaagggtcaaaggatcacaagaccttgaaacaatctggggaactatgtcttgggtcaggttccgtgatggtcaggcccatggttttggacttttggggcctggacttgcccaagtctggagggagattctgaggtggcctattgggcctggattcatattctgggtccagatccagaacattaatttttcttttttgatcttaagtttatatattaataatctgagtgggttggagagtcagtttatgtgactgcaaaagcatactttaatcaaaatatatactaaaagaatcagtcggtacctgcaaaaacagtgttactgatgcattcttagcttgtgcagaaatgttttacttccatttgtaatttgtttgttttcctatcaccaagtttcattatcatttgataagtgttacgcatacacaccttttatcactcacgattatttataataaaagtaaattgaattctttaatcagtgcacaaatttcagtagttaaatactttaactaaaataattttatgaggcgagtataaaaaaagtgtgtaaagtaacattttccttctctttatccaacatataaaaagtactactttcatgttcttgcttgtaaatatgcgagtttgcttcaaatggtgtatttttacggtgtctaagtatccaagttattttcactttgcaggcttcataccgtgttaaggtgacaagatctgcttcaagtgagtctgaaaaggaaggaacaaaactttatcagaaagtatgattacgattctgttcagtcacaatttgtcttataagttacagaaaagttgtacagcataaaagtcggagccgtagagccaacacctccattcctttagtgcagggtataatacactgccaatcatttaggatctgaacattttatacaaacttttgattgtgattaagagaatggaattacacctactgctggttcaataaaagaaaattgatttcatgtctccaatctctttgtatctttccttgatttgaatccaagtctttttacttgaatggcttagccaagttcatgacagatgtttatagcatggatggtgctcttatgttgcaatctaattctgttggcaatgttctcttttttatcaagagttgacatgagcaagcgttgtatatgattcccatttcctacatctatacttgacagacaaaaggcagacactagcattttatcatgaatgagatgtcattgtttctaggatactttattggataaggaatttcattgtataatgctttcatttcattgtcacacgtatgcactatatttcctgtgccagaataggatcatactgcaaaatttgaatcaactggtaggtctatattatttcgaagaggctgttgagggaaattattcagcaaacaaggtccaagttttgtctctgcagcgtgtggccgtatcaagtaacgatattcctttcgcagattcacattcacatatttgggacataatgtgaacaaataacgttttttattgcgcttgaattctaataatggtcaaaggttttttgtattttccatgaatcatgatgctttcggctctgtaatagacattctcagctggtttcggctttgtaaccaaacaaaatttgggtatgtcaggtgttgagcctgcgatccgtactcacctctttaggccttcctaatccatgggatagactgaagctagaaacatttgtcctcatcttcgtatgtgttatttcacaattctccttagacaatta

SEQ ID NO: 377 - DNA, 2896 bp, Glycine max; identical to SEQ ID NO: 236
  source 1..2896: mol_type = genomic DNA

SEQ ID NO: 378 - DNA, 6435 bp, Glycine max
  source 1..6435: mol_type = genomic DNA
tattttatttcaatataaatttgaattttagttcttatcctattgtgttatttatatcagacgctctaatttctaattattttaaatttgcatgtctacgttgaaatagaagttgggggacacatgaatgaatatgctgtccttcaaaactcgcatttgggttgctatgccctaaggacacctctgggttggttgtgttattgatatgatgattttagttttagtaccacacggagctagcgcaagaatacaattgataaacgattttgcaaaaaaaattagtgatggaaaataattgatacaaaatattttcggtgagagagaggaaaaaaaaagagaaataattccgttgtatgaaatgatagaagaaatataaaataattggaaattaaaaaaaaataaaaattaggtatagattcatgaatatcaacgttatttaaagataaagtcaccaaatcaatcatgaagaacccaagtcctaaagtctgcttctcagtgacaaaaaatatgaaaaacataggaaaacctatttgtattccaaccttacagatcatatacatcattagatgtttcaaaattgaatttatctataaaatgcacacgtagatataggtcgatttttaaatttcaataaattaagactataacacgtatatatattgaattaaaaatatttgaatttttatatataagttcgctttcaggaatcctacataagtttgctcctataataattaatgtttaatttaattaatcgaaagcaaaggtggcccaggggatatataaatataagtactctatactaaaccaaaggcagcttccaaaaaaaaatcacagaattttcgcagtccaagaagacacgcatcccaaaccgttttgatttggaacgtgtcacgctctaaatttgcatggcatattgtctttaactgagtcaatttcgcttaataaaacctctcttcactcctctgctttaccaacccaaccccctgttcctgtgtgtgtgagtgaccgagtgagtttgtttttctcagctgatatatatggcgcttgatcgctccattataagcaaaacgacgtggtacagcgtcgtattatggatgatggtggtgctggtgagagtgcacggtgcagccgcgaggccgaaccggaaggagtgggactcagtcataaagttaccgactgaaccggtggatgctgactcggatgaagtgggaacacgatgggcggttctcgtggctggttcaaacggctacggaaactacaggcatcaagtaagttaatttggtttcggtgtttttatttattttctaaaattaattaattagttttatgttttgagttgctctgtgtttttgatttatggatgttgtgatgaattgaattaaattaaaaacaggcagatgtgtgccatgcgtaccagttgctgataaaaggtggactaaaagaagagaacatagtggtgtttatgtacgatgacatagctaccaacgagttgaatcctagacatggagtcatcatcaaccaccctgagggagaagatctgtatgctggtgttcctaaggtgagtttttttttttttttttggttcattctctaacgtataatttaagctaacaaaattaagtgcttaaagagggatttccttagctgctgatttgttaattctgctaccatcgcatgtcattctttcttatttttggctactctcttttcttttcctttttgaaaataaagtggtgcaacatgtctgttcgggaacgtgcgatttagactctttttttttttatgtttttgaagtagagtaattatatatcaacgttaatttctcacaacatcctttgaacagggataaaaataggaagaaaatagagaggtatgtgaaataaaatggactatgcaatggagagacaaggaaaagaaaagtatagagtaaatactatctttttaaaacaaattaagctcatctagccccattagtcatgaaagttgattttataaaacaaaaacaaaaacttaagaagtataatattatgataaagttgtcttataaaacataataaagtaactaaacattaccttctttgtgtccttttaatgactaaaatttataatttaaaattcttttatacttttttaatgacttaatgggattaaaatcattagtaatggaataataaataacttttatttagaattttgataaaatcttattggtgtcaaatataaagtatttttagaaataaataaattgggggggtccatggccccccttacacaatactaagatccatactataacatttatgtcatggttggcctgtgagccggagcatcttgtaagttgaaattcttttttatggaaaggtacgttgatatcatatacttgactcgcgaatcaacttttttaagaagaaaaacaactccctttgaaactgttgttgctggtaattgaattaattagagaaattgtggtgcgtatccatcataatagagtaacttaaaatctaatatatttgaccagataaaagttactagaagagaacatttgttaacacaattattgcgttgttgatagacattagcggggtgagatgtcttgacaaataaaatagatgtgtaaaagtttgcgttcctgttgatgatattttccaaatagtaataatttgatggtcaattcataagctagcactagctacatggtctaaacagattagtcattaatcatcttagtatcaaatattaaaggggtagttacctatattattaagataattgcttcttttgtgttgttctcttctgttcattgaatctgtccctttgataggatgctttttttttttttaggattacaccggtgataatgtgacgacggagaacctctttgctgttattcttggagacaagagtaaattgaagggaggaagtggcaaagtgatcaacagcaaacccgaggacagaatatttatatactactctgatcatggaggtcctggaatacttggtgagtcaagaatgaatttttttttattccggttcttttagttcaatgatttaagtaaaaaacataaaaatcagatcctaaagactttttttctttcttgggttctaattatgaaccttcatactttagtcaagaaggtaaattttaatatgaatatagttgcataaaataaaattatctaagggtgtaaaaatcatcaatccagaactatgtttatatcagataaagacattaattatagcttattcatttcctatctgattgtagggatgccaaacatgccatacctttatgccatggattttattgatgtcttgaagaagaaacatgcatctggaagttacaaggagatggtaaaaaattcatttctctactatatcatgactggaaatgatgccactttacttatggtaagttattaaggagtgtgtgctactatgttggtcatgtaggttatatacgtggaagcttgtgaaagtgggagcgtgtttgagggtataatgcctaaggatctgaatatttatgtcacaactgcatcaaatgcacaagagaatagttggggaacttattgtcctggaatggatccttctccacctccagagtacatcacttgcctaggggatttgtacagcgttgcttggatggaagataggtaccaatatagtgttcttttgtgttcaacccatataccatgcttaatattctaatccaaatgattagaaacctgccaagatattataatcttaggtgaactaaataacactaattgtagtattctattttttttctctgtttgttgatcatgttttggcaccctaagcattaacttcccctctgtttgaatgatgaaactgacctgtggtacttgaattttctgtagtgaggctcacaatctaaaaagggaatccgtgaaacaacaatacaaatcggtaagatattttttaattaacttcaacattgtgcattttcaatatcaacatgaaaaaagaacgaaaaaacaaagctattattgtgcaggtaaagcaacggacttcaaatttcaacaactatgcgatgggttctcatgtgatgcaatatggtgataccaacatcacagctgaaaagctttatttataccaaggttttgatcctgccactgtgaacttccctccacaaaacggcaggctagaaactaaaatggaagttgttaaccaaagagatgcagaacttttgttcatgtggcaaatggtacggttattttcaccttatgtccttattttcaaatgatcaaaactcttgctcaaatactattactcttgtaataacatccatccataaaaattggttctttttacagtatcagagatcaaaccatcagtcagaaaataagacagacatcctcaaacaaattgcggagacagtgaagcataggaaacacatagatggtagcgtggaattgattggagttttactgtatggaccaggaaaaggttcttctgttctacaatccgtgagggctcctggttcgtcccttgttgatgactggacatgcctaaaatcaatggtaatcataaagaactgaatcttcttattccttttaacattcattgcacatgtgtttttctttcactgttttcttattgatcatgcacaagactagccaatctctgaagagagattggaccaatccctgtccaagaattggattgatgtacatattgcacacaaaaaaaatccatttagtgataatttagtttctacattttttaaatgaccaaatttagttttaaaaaatgtgtaaaatgttgtaacaaattagtctttgaacctttaagtcacttagtgtccgagttattctgaaactatactacttactgacaaattactgacaaattaatccgtgactaaattggtaatttcaaaaaatataggaaaaaattgtcaagcaaacacgaagcaaacacatagtttaggactaaataagctatttaccctattagtttaactattattgtacattgctattaagtattaactgattattgatatacaactttggttgcaggttcgggtgtttgaaactcactgtgggacactgactcagtatggcatgaaacacatgcgagcattcgccaacatttgcaacagtggcgtttctgaggcctccatggaagaggcttgtttggcagcctgtgaaggctacaatgctgggctattgcatccatcaaacagaggctacagtgcttgattttgggttttgtacacaaaagctttaaagcccggttgatgatgtaatatttctctattgcattctgcctactggtttctgctgcttgtgtcaaattttctctaaactagagtagcccaatagcatacgtgttatgtgcattggtcatgtatacaagtgtaatactaaaaccttctacataatataagattagttagtttacttgtctctattttcttaaactccgctccttcaaatcaagaagattttgttagttcttactctgatctgttactttcctttcatgaaattgattataaacaatataggtctaaaatttcgacgagaatagaaaaaaagagttacagtagatcagggtggattagcagtgattgtaatgaagcttgaactgttattgagtttaaattttctccgaaaattggtgtattagtgcttttacagtctgctatcactaactccatatccttagaatattcaataaccagtgacttggtttttttttttaaatatcaagcaattaataaaggaaaatttaattaaatatttatctggattatttattaaaaatagtacttgttaatttttttagatagatttaaaaaaatttagagtttttaccttttagggtataattaactttttcaaaccttgttttgttttttttgaaaggatttctaaccttcttaatcacctttgattttgcaaaatgaaaaaagacataaatgttatgagttgcatatttgtaaaatgaggatttgaactccttctctggtgtgctttataagctctatggggtttcaaccaagttcttgatcttttcaaaataatgatatattactgttacactagaggctagagcattgcttttaagaaaaaaaatatagtaattcacctgatttttcttttatctaaatttatatttttttcttattacttataacatttatcaccttttattcttctttttaattatatcacttataacatttattatttttattttaatcttttattatttattttttatttctctcatctttctacctcatctcattttagagtgaacgttaaccagcaaccttagtttaatatttacatgacatatatgatatctttagtgtaaaatttataaatttaaaatatgcacaattttattatataaaaaatagataaaaacaccccatttcattcaattcacctaataatg

SEQ ID NO: 379 - DNA, 4265 bp, Glycine max
  source 1..4265: mol_type = genomic DNA
ggagatatttttttaacaaatataaaaatttagttggacttaaagacattttatatctatattttgatttaaatggacacacattcaaaaataaatataataagaaaatcattatatctatatgtacgaaactgagaggcttaaatacattgatctaatatattcaatatgaattgacagatcgtaattaataagaatgtactcttgaaaattgtcgtctttattttagtttcccatgtgcaacgaaataaaacaagataaagttgaatgcgtggaaagagtaaggaggtcccattggtaaaacacaggggaccataatcattaatatccctcgccaaacttgtgacagacagaacagcaaaaacagtatagtagaccctggtgttgctgcttagttgccattagaaatattatttgtagaacaattcgtacaaaaattatataattaagagaaaaataaaaagaataattttgtgaaattaaatttgactcaaatttaaatttcaatgataatattacggcttattagatcactcaatctccagactttttgcttgagaagaaaaaaatattttagagagagagagatggactagagatatgataaaaatgttcaaattcatattggaaaaagatacacgaacaacatagctgttctaataattcttatatctacatggcaatgaaattttgcagttgcccataatgtagccgttgatagagaagaaagctttttaggtcacgctgggccatggccatatatatgtgtctgtatgtatacacatgacatgtatatgaacaagtgccgttggaatggcgtggggccatgcaagcgaaatcaagctaagaggggcggcaaaaaattatgttaatcatgtcattgtccatacacaaaaacaaaacacacatagtttaattatttgattcattaccacagtctctctctctctctccctttctttcattacttaaataccaccctctttccactcaccccttcaatccactccactctagcacacaaaacttgctatagcagtaagctataactcatttgaggctctgtgagaattgagaaatggctaaagatgttgaggttcaagagcaaggaggagagtactctgccaaagactaccatgaccctcctccagcacctttgttcgacccagaggagctcacacagtggtccttctatagagccctcatcgctgagttcatagcaacccttctcttcctttatgtcactgtgctcaccattattggctacaaaaggcagactgatacaacggtaggtggcaccgactgtgatggggttggcattttgggcatcgcttgggcctttggtggcatgatcttcatccttgtttactgcaccgccggtatttcaggtatcacatcatcccttcaaaaaatatttcatatcaatgataacaaaaaatatttttttccctttatatcactagaaaaattaaaactagtgaagaaataatttatatatataaattttaaaaaaattggtcactataatttagtgacaccagagttgataaagaaaaaacagttcttttctccactaaacttagtcactgattcattgctttttagtagtgaaattatatagctaggaacattcatatctataaactatgaagcaacacaccatactattctactagttagaaggtaagatgttgaacgtgtattatatatgcatgcaagaagaaaatataattttgtggacttggtgtcgttgtaggaggacacataaacccggcggtgacattcgggttgttcctaggacgcaaggtgtcgttgataagggcgttgttgtacatggtggcacagtgtgccggtgctatctgtggtactggattggccaaggggttccaaaaagcatactacaacaggtatggaggtggtgccaactctgttgctgatggctacaacaatggtactgctttgggtgctgagattattggtaccttcgttcttgtctacactgtcttctctgccactgaccctaagaggaacgctagggattcccatgttcctgtaagcatacatacattatttaagaaaaattattactaccagcagtctttttttttttttaagaaacaaatcgtatattttttattattatttgtttcttataaaaaaaacgagagatgagatgtagtatagagtatgagactatcatagtttagataattttctaatccacataactatgttttatttgtaaattggaaataaaatagttgtgtgttgtttaaaaattattcgagactatagtggtctaatagtttctataataattttctatcattattaattcattataaatatcacctcttctatgcatctcttttctaatttatctctttgccttatgcaaaaaggtactggcgccacttcctattggatttgccgtgttcatggttcacttggctacaatcccaattactggtactggcattaacccagcaaggagtttcggagcagctgtaatctacaacgaagacaaaatctgggatgatcaggtaaacataatatccactcataaacttaacttattgtttcctttcccttattaaaaaaaaaatcatctgttttattaagagaatatatatttaaatacaaacatactattacttgttacattttttaccaaagaaaaataatgatgttgaaagtttgttatggatgctgatatggatgctgatggtggtctaattaattttggtgaattgtttcatgatcatcagtggatattctgggttggaccaattgttggagcagcagtggctgcattttaccaccaatacatccttagagcagcagctatcaaggctcttggatccttcaggagcaacgcttaattaattaatcaattaagctagctaccttgattaatttgccaacaagggctatgcatggtgtttcccccgaagaataataatttctatgttgaggagtgctagtgatctgtctatgcagttccctaatttaggctttttcgtcttttcctctcatcagctacagttgttgggggtgtttggaagagaaggccaaaaccatgggggcatgcatcaaattgtagataagcatgcttgtgtccaagggtgtattttgtatcccttttgtgtcttttctttttctttttcttttttttaatttccatgtatgtattccttgagtgttccttttctgtcttgtgcatccttagtcatttctcattttactcttcataattaagtactcatcttctcttgtttattaaagctttattaatcatcatctatgaatgtaatgtaccttgacttgagtaatatttatatatattatgttgcaggttttttattcacacggataagcttaatataagataaaataataagtgaaaccatactctttaattattctttcagtgatttattgccttatattttacctgctcattcgattgttaaaatactctaataacatgtacggaagagagtataacatatctttttgatttcaagtattcgaattgagggatagagtcagtgtttggttctcgatccaacttgcttccacacgaattttgagacaaatataacagtttaatgcaaactaaacacagaaaaaagagtctaaatgtttttgttaacgttgtctgcaccggcaaacgattacataaacatactctttttttttagaaaaatggaagcttctcgaattatatatacaagtctaattaatgaactttacttttggtttttctcttaaaattgagtgtgtcaccaccattaatcttaggcttggaatttcggacaatgtggacaagtgtccttttggaattaggccaaattcaatgtcctttaactactgagtaggctttacaagatcattcacccatttgcgtaacttgcgcttcttgaaccttcaaatttgtctgttaatcccccctaacattgtttataatagatttctgttgggatgcttatcctaatcctaatatatacataaactattgcgaatgtgtactagtggaagagcttaattagcacaataattaaattactattccacgcaaaagctcgcctctttattagataatctaacttggcttttgtggtggtggttctcggacgtgacatgaaatttggattgtttttgaaactcatcgctgttgctggggacactataagttaagtaatgaaaaagaaataaagaaagaaaaagtaaacatgttaggtggatatatgacttcggattcc

SEQ ID NO: 380 - DNA, 6261 bp, Glycine max
  source 1..6261: mol_type = genomic DNA
agaattacactagatgttacttttaaattaattgttataaaattcaataatgttatcatacataataattcataatttgactatacaaaaagtatttatattagtgtattttaattaataaaattctttataaattgataaagaataataagagtttaatttggatgcaaattaagttgaataaattttttatctgtcaatcaataaaaaaattattcttacaaacaattaaaaaatattgttatatgtgttttaagtacatagttactgtaaaaattaaaaattatgattatatataattaaataaaaaaaatcacatcattatcataaactatttactctatttttaaaaaaatcaaaaacatttttatcaaataagttttgtagattttacacttcaaagaaaatgttaaataataaacaatggcttcgttatatcactgctttttcacctagctcttccgtaagatgacattattaatgtattatgctacagaagtttttttttttcttttttattcataaatatgaatatatgattctttggttaggaaaactaaaaaatcttaccaacaaaggttgatatatgggataatgatttgtgtcttttaatcaaataatttagggtttgaaaattctgattgatcattaagtataaaataaattatacaacagttgacataagtgataatgacttgtaactcttaatcttaatcaagtgatttagagttaaaatttggattaatttttaagtatggaataaatgatgtccggagaaaaatatttaccttatgtgtttaagctacttttaataaggataactttataacactatcataattataaaaaaaaaaaaaaagaaaactagaaaacgcgtataggaagatatagttcaaagttggtacattcaaaaaagttgcacgtacgcgctatttgcaagattaatataatcagaaaaacaactactaaaaagcacgacgtgaaatttgaaagcacctttttccctctctctctctctctcttatatatatataggcaatggtaccaccaatccaaatcctcgatcctctatacctattctttcaatttgttcatcaatagcttcgttctactacttgataccttcctgttatattgctaattaggctttctctgatcaaaattaattaagaatgagcttgaaagctctttttgttgggtgcataatatggttgggtttggtagaattgtcaatcggaggaatagtgagacactacaagtttgatgtggagtacatgatcagaaaaccagattgcttggaacacgttctgatgggaatcaacggtcagtttccaggcccaactattagggctgaagttggtgacattcttgacattgctctcaccaacaagcttttcacggaaggaactgttattcactggcatggaatcagacaggtttgttcacttttgtttttcatgccattttggcctatcataatccattgacataaataacaacaatttgtgtttcttaacgaagtgatttaaaattcaaattttcattaatttttagatataaaataaatcgtattagaaaaaaatatttatttttatacgctcaagatttttaataaagatttatcactatgacaaaaacaatttcgtatcactatcatagttgcaaaaaaaaatcattttaaccttattttctaatcacatcaattaatataattttatatttataaggtctaaataaaaagtatgaattagtcattttgacctcatgcatattactcccaaaccccttattactaagcccgatccaattgatttttagttagtcattttatttgattcaatctaaaatatcttttgaattttttttttcacaaaaatgatcttcattaaagtgagttctaagataacattataacaatagaaacataatccattaatagcatattttttaccaggatagttttgaagaaaaaaaaactaaaaccaaatttaatactcttaattaaattaaccaaaaattttaatcatcataaattaattaattgaatcttataataagtactaaagctagtattatatttatctcttcttccatccttggtccactccataatagggaagacgttttatatattttccttttaattaacatgccgagtgctagctaactcaaaataccattttaaaagttttttctaatttatgttttcaggttggaactccttgggcagatggaactgcttccatctcacagtgtgctattaacccaggagaaacttttcattacaagtttacagttgacagggtaattacacttctctcatcatttcttctttttttttctacttttgatgatcttattaagaagaaacattaaactttaattaagtcatttgtataactgagtgaaagcataaaattgatgtcccatgtgtactcactactacaattaagtgttttaaaaatggttattggagacattctaccatagttttaaactgtttttttatttttgatcgagtcaaaagctcttattggtttccaaacattaaagtaagaaacaaaaaaaaatgtttttaaaaaacaactattttttcttttcattttatgtttttaatcaaataaaaaaaaaaatatcttcgttagtgttatctatttttatgtaacgatgtattcatggatattatatggtgcagcctggtacatatttctatcatggacaccatggtatgcaaagagcagctgggttgtatggttcattgatagtagatttgccaaagggacaaaacgaaccgtttcattacgatggtgaattcaaccttctttttagtgatttgtggcacacaagctcacatgaacaggaagttggcctctctacaaaaccactaaaatggattggtgaacctcaggtaattaactcgattaaattaacataaattctatttttcttctctttttttctttgcaaatcttatacataattgagttatcaataaaaagaataaaaaataaccttcactatatattccttaattatgtattgaaataagatgcaagcatatatatgtatatagttattactactttagcttgttctgtatactactttagtttgttcaataacaactcttaaattttgacaaattcaaacaagattctattattaatttttactgagtacataactaattattttcataactaacgtaagttttgtctctataattcatttaatctttatttctttgtatcttctaaaattccgtgaaataacttaaacttgaacatgtggcccatctgcgcaaagtggtaatgaatttttataatatagggcttctttaatcttcactccccaactgtttttcttttctgttgaatgataaaagaattaaatggtcgtaatttccactttttttagactctgctcatcaatggaagaggacagttcaattgttcccttgcttctaaattcatcaacaccaccctacccgagtgccaattcaaaggcggtgaagaatgtgcccctcagattcttcatgtggaaccaaacaagacctatagaatcaggattgcaagcaccacatccttagctgcactcaacttagccatttcggtgagttctatacgactctatatataatatgtttgcgtttaatttattattatctcccttttcctccctctatttaattttaaatttttatcgtctctttggattccaaatcttttgggtgcccattcaccatgccattgaataagcatccaagtgacaattagctgtcagatgagaccactttaaaatattcaatttattattctcacttttcacttaaatccaaatgatatcaactatagaaatccacgttaaatcatcgcatctattattgattgtttgttatgctaagaatagaataatttagggtatcatgtctaggtgttatgttaataaagacttaactattagttcaagaaagttagtaaatgatgtaaaacacaataaagatagacgatttcaagatcgatatatctttcatacataaaataaaagatttttagtagatgggaaaatccgtgatttcttatgttaagtccattaattaccactaccctcataatttctttgcgtgttgcagaatcacaaacttgttgtagtggaagctgatggaaactatgttacaccatttgcagttgatgacgtggacatttactctggcgagagttattcagtgcttcttcgcacagaccaagatccaaacaaaaattattggctttcaattggcgttagaggaagaaagcctagcacctcacaaggcctaaccattctaaactacaagacaatttctgcctcgatttttccaacttctccaccacccatcacacccctttggaatgattttgaacatagcaaagcattcaccaaaaaaatcatagccaagatggggaccccacaacctccaaagttatatgaccgaagggttttccttctaaacacccaaaatcgagttgatgggttcaccaaatggtccattaacaatgtgtcgctaacattgccaccaaccccttacttgggctccatcaagttcaaaataaacaatgcttttgaccaaacgcccccacctatgaatttcccacaagattatgacatctttaaccctcccgtgaaccctaatgcaacaattggcaatggggtgtacatgttcaaccttaacgaggttgttgatgtgatattgcaaaattcaaaccaattaagtgtgaatggtagcgagattcacccttggcacttgcacggacatgacttttgggttttgggatatggagaagggaaattcaaattaggtgatgagaagaaattcaatttgacacatgcaccattgaggaacaccgcagtgatatttccatatggttggactgccttaaggtttaaggctgacaacccaggagtttgggccttccattgtcacattgagcctcatttgcacatgggaatgggtgtgatttttgcggagggtgttcacaaagttgggaaaatcccaagagaagcactaacttgtggacttacaggaaagaagttagtagaaaatggacactactaaaactagtcatagtaccaacataaaataaatgttaaatggtatttatttaatttaatttttcaatgttcaactaatattacatttaaatttacatgttaacgtttatatatatgtataagcttaagattatgttgaataatgtcaacaccaattatatctcatttatctatatactatacatttcctactcgtttttggaaacttttgtcacatgtcaacttctggtgttataagtttttcatgtctcaacttttgatgcaattcattttggaacacttttttattccactatgttaagtcagactgttcaagatgacaaatacacaacagtaccgcatctaggatagtagggcattctaaatgaaatctgtcattagcatattgttgtatatgtacaatttgtgcataggctattagtataaaggtgtgttagtagtagcttagagaatactaagtgtagctaggagtggtaagaaagaatacttgtttgtaattgcaagttgattagtagaaccacttacaattggataaaggagaactggatgtagttcaagttgagtgaatcaatatcaatcaagtgtttctactcctcttccaagctttcctttagtatttcttaagcagctatttgacacattttgcacacaaatttttcatactttgttttcatataaaacctgttttattaaggattggacaacagttccatctgtttaagtaaaattgatatttgtcaatggaagagaggtgcaaaacctggttagacttgcacaacaataacatattgtggaaaaaggttatctaacacattattcacccacccacccccccacccccttctagtgtgatttctttgattagtctattaaaacacacaaaacacaaagattcatgctattttattggttagctcattaaataacataaatttgaattttgtttcctcttgtattttaatcatatacttagtcatgcaattaaaagaaaactatgacattatatgtagaattggatgtatcctaatatttatgagcgaatcaatataagtatgtgtgtgttgtcaaggacaaaaccaaatttttttttaggcaggtgaaattaatttaacatgtaataaaaaagttaacaatgatatatttactattgataattttttaaaatttagagta

SEQ ID NO: 381 - DNA, 5744 bp, Glycine max; identical to SEQ ID NO: 304
  source 1..5744: mol_type = genomic DNA

SEQ ID NO: 382 - DNA, 4375 bp, Glycine max
  source 1..4375: mol_type = genomic DNA
acccatcacgtatccagactatctaacccaagacgggcttgaccaatgcggaacaataaatccaaaaccaattttaaactttgatccaaggatttgttattataaacgataaaataactaaaaaaaattaaaatgtcacaaattacccgtcatatcattatttaacggatagacttaatggcagaaatcaaaaactaaacaaataatagcttaaggatcaaaaccggttaaataaaagtttaagattttgaaatgtatctaatttcatgtaaaatgacaatgattactttattttattagtctaatttctatttttcattttacttttatcaaaccaaaaaaaatacatttttaattaagacatataaaaagcctgaaggctgtccacagaacccacaatcaagtccatttaccccaatttaaataggctcaataaattgattgagttaaaaaattccacaatttaaataggctcaaaaaattaaaactcaaacattgcggactgcgagtgatgcggatcccgggtccaagccccaatgtttggcttacgagacacatgcttgcaatttcaatttttaaataacagggtgcacttcatctaatgaaattgccaccatgttaatatcccaattagtaaaaattaccttatttttaataaatagtatattttacaacattttaataaattatttaaaaatatataatttggttaaaacccttcccaagtcccaaccttagccgcaaaatccacatttggattcgttcaggccacacgagcaacaacaatacaagtatatccctcgtggcactgcaattcgaatcagcaagtaatcacagtcacaaaaaggaaaactatacgaagaagataagtgtgggaccaacagtatcacaaaccattccctgcctctcaatctctttgctctcagtgccttagaacacaatccatgtaaccaccactagcaccataccacactgccaaaatcaacaaaccaaaaaggtaaactttttgcaacaaccatggttgcaatggcagcagcaacagcatccacccagttgattttctcaaagccttgttccccttcacgtctatgccccttccaactatgtgtctttgacactaaacaagtgctatcaagtggcaggagaaggcatgtggggggttctggagttaggtgcatggctgtgggggaagcagcaaccactgggacaaagaagagaagtggatatgagcttcaaacactcactagctggttgctgaagcaggagcaagctggggtgattgatgcagaactcactattgtgctgtctagcatttccatggcatgcaaacagattgcttctttggtgcaaagagctaacatttccaacctcactggggttcaaggtgctgtcaatgttcaaggggaagaccagaaaaagcttgatgttgtttcaaatgaggtcagtgttgcaattgttgtactttacatgtttatagatcgtggtttgcagatgatcagttcatgattcgtgattggtcgtgatatgatcgttaaggaaaacaacaatctctaactcagtgggttggaggacactcctggtggcgtggtgtctgacccacaaccaaaagtgttgcaattacaatattccatggttttttttctagaattatatatatatgtagttggttcaattcagtgagcaattaatttttgtttttgcccaagttaaaattatgaaaacatgtatgatgtatcttgaagaactagattacaagggattgtttgtcaaagtttgtaaacaaatttatgggctgttgaatgtgaaggcttaattaggtaactatggttgacaagcaaggtattgtttttgcatttatcaggttttctcaaactgcttgaggtcaagtgggaggacagggataatagcatcagaggaggaagatgtgccagtggcagtagaagagagttattctggaaactacattgtggtgtttgacccacttgatgggtcatccaatattgatgctgcagtgtcaactgggtccatttttgggatatacagccccaatgatgagtgtcttgctgacattgatgatgaccccaccgtaagtcttccatggtttattatttcatttcagttaatcaaaggattgacaacggctcaaataaaatgagcctagaaaatctagtttcaaaggtaaggaggataattaggtttgactaaaagaaaactgaaaatcttggtttaaaaatgtgactaataaggtttaagaaaaaaaatggctgtgaatcaagtagaatatatacatcttactttagataaaagtaaattgccattcttctaattttcattttaatctctgtaagatgctaagataatgtaatcagaaagttactgaaaaaaaatatattgaaggttgactcaactagtaaaatcaagcatgtcaacataaagatattgaattgaattcttactagtggttcataacactaattcagacttgtaaaatattatctccaccctcccccttatacactatcttaaaaaggaagagttgaaaaaaaaaattgcaaaaacagattgttagtgaaattcagcgcttaatgttatgcatatgctaatttgcagcttgacacaacagaacaaagatgtattgtgaacgtgtgccaacctggaagcaaccttcttgcagctggttactgcatgtattctagctcaataatctttgttctcacacttggaaatggagtgtttgtgtttacattggacccgatgtatggcgaattcgttttgactcaggaaaacctccagatacctagagcaggcaaaatctatgcattcaatgaaggtaattatcagttgtgggatgagaagctaaagaaatatattgatgatctcaaggacccaggtccaagcggcaagccttattctgcaaggtacattggtagcttggtaggagatttccacaggacactgctatatggtggcatttacgggtaccccagggacaagaaaagcaagaatgggaaactaaggctcctgtatgaatgtgctcctatgagcttcattgtagaacaagctggtggaaaagggtcagatggccatcaaagaatactcgacattcaaccaacagaggtatgtatagatggaccttgtatgtctctaaatgctttagaagttaaggatgaatgttataatggatagttttattcattccttaacctttatggacagattcatcaacgtgtgccactgtacattgggagcgttgaagaggtagagaaggtggaaaagtacttggcttaaacgataagctaatgcaagaggtttacttgtgtatgaaaactatgcccaatcaaaacttccaaagcaatacaatcaggttttaaggaagaattctttttatacccccctccccctccgtccttttgtgcaaagaaaaaagtgatgccaacaatcttcatatcagtttgaacaagaattttgtataactttgaacatgtttcaaattggatataattttgttcattctggcaatatttctgccaagagaagcaatcatgtcagtaaatttcaaacccttctttctcactgataccaaatcatgtgaaatggttctagatgttaactaaatgactgttactacctattactttcgatgagaacttctggaggacttaagtatttaacgcaatcaaactctgggaaattttttactgtaagacatttgacatgaatttagatttgagcttatcagatattaccagatgaaacttgaaatttatgcaccgatgtattagcactacaactaaattaaagcaagtgctgactgattagggtcgaagagacaatatttaaactaatcaggaccaatgactaaatatatcatttaccaattggtatcttgttttcccgcaaactgttaacaaatacaaaacttggatgttttaaagtaaaataatcaccatatccatttaagattcttgaaaaaatttaaatcccagcatgtctagtctttcccttgcctcttccattgaaagtttaactgtcaccacatagatccagaaattgcttaaatgacttagacttcattacaaggctgttaaccataattgccatcaaaatgtaacccaactaagattaatccttacaataaaccaaaacaagggaggaagctatctacaatcattttttaagcttgaccaaataggctaagcttgtaaggtataaatgaatagcaggttatcattctaaattcagtgcaacagcagagagcaattctttggaacaatagatataaacatctcctgcagtgagctcacgttaataagtcaggctgagtcattcttcaaattgtcatttatgtacaattttcccaatccacagactactg

SEQ ID NO: 383 - DNA, 7152 bp, Glycine max; identical to SEQ ID NO: 359
  source 1..7152: mol_type = genomic DNA

SEQ ID NO: 384 - DNA, 3781 bp, Glycine max
  source 1..3781: mol_type = genomic DNA
atatatttttgataaatcaaattttacaataaataaaaaatattttaaatatataaattattaaattttataataaatacgtccgtactactatatatgaagtatactttagctttacaatgaataatttaaattctgaatctgatataagaaatattttaattattaataattttaaattttttttattaaaatgcaattaacacttggaagagatgagcatgtaagattcgcccaacaaaagatcacagatcacttgacgacttgacgtacgtacttgatgacaaaggttcaagtttatattattatctgttgagcggcgagttttaacaaccaaggtgttgtaggggggaaaaatattacatgattgaaaactattataattccaaataatcactacttgcagttaaatattattaatttgccaataaaatttaatcaggtgagaaacaaattcttatatatctcataataaaaatttcgtttaagttcatatgtgttggaataatttatttagctatagaatttgtgtttgatttatcttgtgtgtgtaaaattatttttggatcaatgacacactcgtatgtttgtacgagataaatttttaacctaatggaactaagaaaaatttgtggctcctgacccaaaacaaaaaaatatatatctaaatttgatttcaggtacccaaatgttgtttttttttataagtattcatttgtccttatcgaatgataactagcgagaacaactcagctcaactttgaatgataattttaagtgtctcctacagaaaatgattaaaacaagaaggatggtccaaaagtatctaataggccatctcgatctcatctgaccaagcttcctggttagttcctttgaattgaataatataaaaaaaagaagatgatggatgtgggtagagctcagtataacccacctacctccaattgctgacttttcaaaggccaaacatgaagaaatgttgcagtataaaaaggggtgcccttcagttatgtccatcaacaaatattggaatactacactatacttgtcaaccctttgagagttagaatggctgctgctattgaaatccccacaatagtgtttccaaactcctctgcccaacagaggatgccagtggttggaatgggatctgcccctgacttcacatgcaagaaagacacaaaggaggctatcattgaggccgtgaaacagggttacagacacttcgacactgctgctgcttatggctctgaacaggctctcggtgaagctctcaaggaagctatccatcttggcctcgtctcccgccaagacctctttgtcacttccaagctttgggtcaccgaaaatcatcctcatcttgtccttcctgctttgcgcaatcacttaagtgagcatttttttcacactaaaacttctttgattttaagtttgataattatttctcaatacaaaagcgatgttatatatgtttttatatgtggagctagccattagaaaataaattcaatactaattctcagttaagcaactttaagtaatatttgtgttcgatccaaaaattttcatttcagtgtttctccgcctaatttaattttaaaataaaaacattcaaacatatattatatcaattcaaaaatcagttccattcaaaattttgtcaactttcaaacaagtgtattctgacttctataaaagctctcttgtaaaagtttatatacatatataacttaattatatatgctataactctgtctgattcattttacttcaaatatatatatatatatatatatatatatatatatatatatatatatatatatatatatatatatatatatatatatatcaatgcttttacttacataaactttttgtcgtgcagaactcttcaactagagtacttggacctgtatctcatccactggcccctgagttctcagccagggaagttctcatttccaattgaagtagaagatctcttgccttttgacgtgaagggtgtgtgggaatccatggaagagtgccagaaacttggcctcaccaaagccattggagtcagcaacttctctgtcaagaagcttcagaatctgctctctgttgctaccatccgtcccgtggtcgatcaagtaagcctctctctctctctttctctgtgtgttgtatttagttttgtttatgcgaatggttgatgataagaagaattactactgttacaggtggagatgaaccttgcatggcaacagaagaagctaagagagttctgcaaagaaaatgggataatagtgactgcgttctctccactgaggaaaggtgcgagcaggggcccaaatgaagtgatggagaatgatgtgctgaaggagattgcagaggctcatgggaaatccatagcccaggtgagtctgagatggttgtacgaacaaggtgtgacatttgtgccaaagagctacgataaggagaggatgaaccagaatctgcacatctttgactgggcattgactgaacaagatcatcacaaaataagtcaaatcagccagagccgtttgatcagcggacccaccaaaccacaactcgctgatctctgggatgatcaaatataaactatttactactatgcagctcccactctatttttataatccatctttttacctcttgtttcattttacgtttaaataattcatgccatgccacttcttattttagatttcacaatcaataaactaggcacgcgcggcacatgatatgaataaactatgttcaatttttttttcttctcttagtccttctatttattaaaagaaaaaaaaatcttgattaattgaaattcgattaaaaaataagtaaaatttaataaaaaataatttccgtaaaaaattgaacctaaatattattaaaacaatttaactttaacttcagtgtattaattaattgtttaacccatttgcaatttgatcttaattactaatggatgatattgaaagatgattttacactaagattaagttaaatttatattaatctaattatacaatctatacactttgctgcaagtttctatggtaaaggcccaggcttcaaattttgcgataaggtatgaccaattatttaaaggagtggttgatcagctctactatttctagtgtcgttttatcaataaaaaattcaatcaatcttgtttgttaagaatcggctacaccatataagtttttttttttttttttttttacattcaacatattaagctatatgttttctttaatacattctcttaattggtgaaattaaacagaatgccgagtgaaagagatagccagagaaattaatgacaatttataaaaataaaaatcatgtaaattccacatacatatttatagagttttgtactcacgcacgtgcctttgtttctttttctctagctaccacaaaattccatgactactctggatcacctttagatagtctattatggaccacatttagtaatcgttagattcatttcaggtttatattgatacaatgcattttacacactagatccattctcaccttccttttctccccagcttcaccggaatcctcatctctgtgcatagttcttgcaaactttcctttctcaagagattgagtattaacaaacaacttggaatattgcggtcaagagtggctctgatcactgcataaaaacttacagaaacatgctactataacaaccattatttcctgcgcttattgtaccactttgaaacaatttgagaattggatctcttgaacc

SEQ ID NO: 385 - DNA, 8211 bp, Glycine max; identical to SEQ ID NO: 361
  source 1..8211: mol_type = genomic DNA

SEQ ID NO: 386 - DNA, 23534 bp, Glycine max
  source 1..23534: mol_type = genomic DNA
tgattctgattctgatttctttctctttttctctctccctatataaaagacattcgcagtcttttttacattaaaagaataatcatttttgcactgccacgtgagtgccgtgtggcgaaagagtaaacaaaaccgttactccctgccgatggcgatctccgatgtgcctgcagccgctggcacgaccgccactaccaccagcgactcagatctccgacagccttctctgcggcgcaggtcctccgccggagtcctcttcgacgctgccagagattccggctccgacaattccctgaccggcaaaatcaccgacgacgacaacatcaaagatcacaagccgaataatcacgcagcctccgacgacaatgtgggcgccgccgccaatgacgctgggcaggagcaccgacaaccggtcgccgatttcaaatacgcttaccgtccctccgttcccgcgcaccgcagaatcaaggagagcccccttagctccgacaacatcttcagacaggtacatctctctcgctggttcacgattccaatcgtgcatggcacgtcgaattgacgaaaatgtaaaattgtagatgtagctcgtcgaattgcactggcgacctaaacagctttcatgattttgtagtaataataataacagtagttacaaatatgcagtgaactatactctgttttgaaaatataattcaagttataagagaaattgtaacgtgcgtgtgtataaatgatagtattttttatttttattggcaaatgttagtttgttaaaattttagttttgttagtagagttgatcgaactccccacctttcctttcctctctttcattctcccttaagcatccaactcacctttcctctctttcccaacctactctttattggtatgtgaggtgcatgcttagttgttttgtttgtttgtttatcttttggcctcatctatagttctttctattttttatttttactaataattgtcattgttaatcaatgaattacagagtcatgcaggactgttcaatctctgcatagtagtgcttgttgccgtgaacagcagacttatcattgagaatttaatgaaggtttgcccctcttccctctatttttcatgtctatcctgcaaaatttggatttccaacttgtatgcatgcatttatctgtgtgcagctgttttaacttttttgtcatcggtgtgcatttatgttttgcagtatggttggttgatcaagtatggcttttggtttagttcaaaatcattgagagattggcctctcttcatgtgctggtatgtttgatgaatcccctgaagagtatactatgctttgtgtatccattttgaggattaaatcttaaattgtcatttgacattctggaacgatatctatgcttcgttttcagtcttagtcttgccatatttccacttgctgcctttgttgtggaaaggttggcacaacaaaagtgtatttctgaaccagtaagtggtctgaccaagtaagcttttattatattttatgagaaaaaaaatgttgtgaccactgaccacctcagttccttgatttttttacagtgacaattgtttcagaatattacatgagatattgttaatcacataaatttcaatagttacatacatgtgaatgttgaattgaatattgcaggttgttgttctacttcatctaataatatcaactgttgaactgtgctatccggttttagtaatactcaggtcagtgtagtcttcaaaatttattgcagggtttcaatttactttttttttttatttttttacatttgttagtacacaataatatatacaaattttggaagtatttgctaatataattcgaacttaacttgataaaggtgttataaccatggaataatggccattatctaggaaggaattttaataatttttttggcattatttgagaagagatttaatgccctttgatgaacctcatttcaatgtttggtttatactatgctgaagttagattatcttgataattgttatcattataaacacaaaaggttatgccaaggaaaaattgaaaacaatttttgttgcttcttcaaatgtactaatgtgataaatatcattagaaacacaaaaggttatgtcaaggaaaaattgaaaacaactttgttgcttcttcaaatgtactaatatgatcaaagaagaagcctagtctgtcgaaactacataaggagtcatttgctgtcagatgcatttgactgacatccatgtaacatttgcaatcccttaataattatatgatcaaagtaaatccctatgtttccatcaacagaaaaggttaccacatctttggcattctttttagaaattgatttccttgtaagggatacagtaaagatgtctgcttgttggttataataggtaactgttcatttcattgatatcaatagcaaagataacttatgaatctggtacttttctgtgcaggtgtgattctgcttttgtatctggtgtcacgttgatgctattaacttgcattgtgtggttaaaattggtgtcatatgcacatacaaactatgatatgagagcacttactgtttcgaatgaaaaggtagtggttagttttcatgaaaaataatatatttaataagagcttatgctgtacattttatgtgatggttagtttttgagaatgatgaatgaccaaactgtagttgtagtttgtgttctaaaactaaatcatatgcaaaatacagttttgttttatcattattagaataacatctatcccactcccctctccaatccttccttcgtgctccatgctgatattctgctataatctgttcagattagtgaaagataaacattctgtttttccccttattcaataatgattccctgtgttatagggagaaacattacccaatactttgattatggagtatccgtacactgtgaccttcaggagtttggcatacttcatggttgctcctacattatgctatcaggtagtggaactttttaagtgagttgcttacttactttctgtttgcaaaattattttgatttgttgttgtagcatttttggattcaaatctcttactggcctttgtgtacatttatttttctgattgaagcccataaggcattgttttatgaactttttccacctatgtcgttggtgtgaaatgcatttgaggttttaagttagagctccagtcagaatccatcacacacacacacacacacacaattgtacagctaggaatgaaatccccatcctacaagaatactgatctgtaatcattcaatctgtgggatttgtccaaatgactaactctttattttcttcaatagatgttatatctttcggagaatctcttcatttttttatcttaaatttcctttcatctccagatgttgcccctttaacttcattcttttctgatactataatctctctctctctctctctctctctctctctctctcgatagacaggagcaaattttcagtactcctatagtgcctactttgatcgttattactcttattttgacacttttttttaatctcaaaataagttttaaaatagggaaaaaaataatcatacatgccaagtgtaatgcttttaaaggaagcagtaaatattcctagagcacaggaaattttttcttagacagctcaacactttgcaataccaagcactgcataatgaaatttgtagcagaaccaccaaagttccctatcatgcttcactgctaccttccattcatactaaattcccaacaacaaaccttcccattgtaatgagctagtttctatctcattcttttttagttacatcttcctcaatccactaattttggaggggtaaaatgaaacttgctgatctggttgcattttacaatggtggtcgtttctcattttaccctggtgctacggatcttttaggaacctgctataacaccactcagtgacataaaaatataaatggtgtacatttgtggaacttcacgatactggttggctttggcactatgttgcatggatacaggtacagtaccgggtatgagtacagtaccagtaccgggtacaggatacaagatttttcaaaaatctaggatacagattcgttaatatatatttcaaaataatatgtatgtatataaaaaatagaatttaataggtatgactaaatcttcaagtggttaaaaaaacacaaataagcataatttataatataaaagagattaaattgtttaatttgatatcacattttaatagtattatgataccatattttaacaatttcaatcttatcattttatcatcaatagtcacaataaaaaatgtctctatagctggtttgttaagagaaagagtagtaacttgaatttaagaatgtcaacctcttttataactcttactcttttttaagagatgaagatttgtatgcataaagaactagatgttaatgtctctttggataaagcatatttattttcgtagaatggctaaaaaaatatgtgtttcaatttgttttgtaacatacaaacttaggtgtgtgctttgataggtactaaaaagtacccatatgtacccaagtgaaataccccattcgttttttgaaaaataatttttggtacgtacctggtacatactcacgagtacctaacaagtaccgggtacaggtacgggtacatactcagtatgtgtatggcacgattttagaagtactcatgcttcagagctttgtcagcttcagttgtttttggtgttcgctttttagtaagaaatcagctctttgatattaattcatcacttaacccatagggaaagagctggaaaagattttgccagattttgttttagaagtattttctgctgttcacttgtttttgcacttgccaaaatgcatttgtgtgttaactttgttctagtagaaaattctgaaatttttactcacatgtattttacacttaaatgtcctatgtgatgaattactgttatagacaagctatcctcgcacaccttcagttcgaaagggttgggtgtttcgtcaacttgtcaagctgataatatttacaggagttatgggatttataatagaacaagtaagcactatccgttaacaaatttggggttcatctctacccttttcccctttaatttctattcatgaattctgctatattctgatttataacataattctgttcataattgcagtatatgaatcctattgtacaaaactcaactcatcctttgaagggaaaccttctatatgccattgagagaattctgaagctttctgtcccaaatgtatatgtgtggctctgcatgttctactgctttttccacctttggtgtgtatttcctctctctctctctgtgtgtgcttgtctctctctttttgaaaaaatatttgcatgaaattgctgtttcacaccataaattgaagaattgtagctctcagttgttattgtgtttattgccgtgaatgtttattgtcagcagggagatttttcaccataagaatgattaaactgtcattaaagattacatctttatcatttttcagtccctctcaatgccaagatagcattggaaaactgatagtattaccagagggggagagagcaaaaataagtaattaagtaaattcggcaatgaatgtcaaacagtgcttccaagcaatggcaagcaaacataattaatggcttggaagaagtgaaaagagtgtcaaacaaaaagaagtgtggaacctaagcatgaataaccctcaaagtaaaggaaaaaggatagaaagctgaatccatacagactaaaatagggtcaattgaacaaataacgaccattatattgcatgtagtgtgggaacagcaatcaaacagtagcaaacacatcaaatagagacaaaccataatgatgatgtggttgcctgaaaactgaagaaaaatgccaaacattctttcacacattgatgatggtcactgagaaagaaacatggcagaacatcagtgcttagaaggttaaaatagattgtttattgccataatttaatcagtgcacagtaggagaaaacattgtcatcagttctttttatggaaatcagcaccaaaataatgacagaaaatggagaatggttctgaccccaattataaggtttaggtagagaaagaggaaaaggaatactaaacatatttggataaatactcaatttagtccttgaatttgcaaagcgctgacactaggatccctgaattttgaaaaaaataaaattttgtcccttaatttgtaaaaagtgtgacaaatccgtcctaccatttattttttccgttaatgtaaacggcaaagtctacggggtatcattggaccgttttgacaatgagaaatttgttaagtatgttgctgactcgaatggactaaattgtcatctacaatttcgatagaccaatatgtcagcttggacaaatttccatttattttctctttctttctcagatccctttttgtttttcctctcctctccctcttcctcacttccctctccttctgtgcttctatgtcaaggaccacaatgtcgccgccgctatagtggtgctgcagacatggtgcgatggttcaaggagcgacatcgaccttatgaaggaggtagtgtacacatggtggaaggggaaaatagaaagacagaagaggaagttaaacaaaaagcgccgttgccggaaatcactttcgttggcggccaacgacgacacttatgttgctttgaataacagccatgtcgaagcagcattgggcaagagcatggcagttcccagtggctcgaatcggttaagggacttatgggattaagtatgagtgcccttgttactcccttttccttttgttttgtgttatggtggtttctctttggttagtttaggtgtggcatttgggttgttagaaaccactgaaatgaaaatgtaatactagattcagggtgtatctgttcatggtggactaatttggcatttagttgttaaattcagggatttaaatgacattaagtaatattattcaggggctgatttgtcagtttttttttataaaaatgagacactgaaaatggttcttgatgataaggaatccaattgtcaaagggtttgtctctcactcactcagagaaggcaggaacaccaaaaggcacacatggtgggcattggtgagaatgggtaacaaatgttgacccctttcaatattatacaagttgtaaaaagtgaaacaaaattttctgacaaattagtccttcaaattttcatatggcaatttagtccatccgagtcagcaacacacacaacaaaattttcattgtcaaatacatccaacaatgccacgtagacttggccgtttcgtttaacaaagatttgacggcaaggtggatttatcgcacttttttcaaattgagggacaaaattttattttttcataattcaaggacccaagtgtcagtgccttaaaaattcaaggactaaattgggtatttactcaaatatatttggattatattgatgtggtaaaaatgatgtgttacaggatactaatccattggttctctttatacaaatgattaggtcaaatactagtgcaatactactagtacaagcccaagcctgataataccatacgtgatacgactactaaccctgataaattaaggtgtaaaaaataaggaaacataataaaattaggaaacaatgtctactattgtttcctctattaagcattaagtaactaattgattccataatatactctaaagataaaaagatattctgaaatcttctaagatacacaaaagatattcgaagacattttgtacatatttgaactgatagaatatcataaaagagaaagagagagagtaaagtctatttctcatatattgatcttatctgaaataatgaatacaatgctcttatatagagtagcaacaaactattgcataacaacgtaacaaactaatagaatccagctggcataactcacttactaactatttaccctattcactctattattcccccttagaaactgagggtgcatcaagcagattgagtttgttgatcacacgcagtttgtcatgcagagggagaaatttcactgctgagagaggcttagttagtaagtctgcccattgatcttgggctggaacatgcttcacaatgagattcttggagagcactttttccctcacaaagaatatatccaattccatgtgcttggtcctattatgcagcacagggttatgagcaagggtaacggtactgaggttgtcacagagaattgtgggagtgagaagtctgcatttaagttcttgaaggagagactgcacccatagaatttctgcagcaagttgagccatacttctgtactcagcctcagcacttgacctggcaaccaaccgttgtttcttagaccaccaagatatcaagtttggaccaagaaacacacatgctcctgaggtggaccttttgtcatcagggtctgatgcccagtcagcatcacagaacccaagcaaagacaaaggctggtgaggtgaggcaggctgaattagcaagccatgatgcagagtgccactaaggtacctcaatatccttttaactgccttccaatgctcttccaagggattagataaaaattggcaaaccttattgacagaaaatgagatttcaggtctggtgagagtggcatattgaagagcccccacaacagatctgaactgagtgggatctgaaacagccggcgaaccaattttagacaatttgcttgtggacaccataggagtaggcatgccattagcattgagcatgttaattttagcaagtaaatctgtcagatatttggcttgagagagaaggagggagccattaggcaagtgtgttacctctatgccaagaaaataatccaacttacccaactgtttgagggaaaaatcagtattcggattcttgattaaagcagtaataaaggatgcagaattgccagttatgatgatatcatcaacatatacgagcaccattatagttaagcttgcagtgtgaaggagaaatagactagggtcacatttgctagcaagaaaaccatgatgcagaagggatcctttaagtttatcaaaccaggctctaggggcctgctttagtccataaattgctttgttcaacttacatacaagtgtcttgtcagcagcttcaaacccaggaggctgcagcataaaaacttcctcctcaagggtgccatttaagaaggcattgttcacatcaatctgctgtataggccacttgtgagtaacagcaagagtaaggacagttctgacagtaacaggcttcaccacaggagaaaatgtctctgtaaaatcagtgccagcttgctgatggaagcctttagctaccagcctggccttatatttgttaatggagccattggggttctccttcaccctaaaaacccacttgcagccaattggcttcctagaaacaaatggcgacaccaaggtccaagtctgattctttaacaatgcatgatactcatctttcatggcctgaaaccaatggggagaagacaaggcctgaccaactgaagtaggttccatatgagtgagtaaaagagtgggatgaattttaggcttggtaatgccactcttggctcgagtttgcatgggatgagtgttatgaggatggatagagggttgttggggggttggtacagggctgagaggagaactggtggctggaatagaggatggagaaatggtgctggcctctgcaatatcagatgtgataggggtgagagaagagggagtgatgggagagtgtaaagaagaattttcagaagcaggggaagcatcattggaaggtgttataataggagaattggcagtgttaataggagcagacatagggctgctaagagaaacagaggtaatgggtgtagcaggaacagaactgacttgtaagaggaatagcagatacaggaactgctggtatagaccaggcagaagaagtatgaggagatgatgtggatgtagcagaagaagaggggaataagatggagtagggaaatctggtttcattaaaaagaacatccctagagatgtaaatacggccagtagctgcaaggcatttataacccttatgaatggtagaataaccaaggaatatgcactcttgggatctatagtccaatttatgagcattatagggacgaaggaagggaaaacaagcacaaccaaggactctaagatgagaatagtcaggtattttgtgaagtagcttgaaataaggggactggttggcaagagacatactaggcatcctattaattaggtaagcagctgtgacaaaagcatgatcccacattttgagaggtaagttagagtgagctaataaagctaggcctgtttcaacaatatgacgatgctttcgttcaactatgccattttggtggtgggtgtggggacatgtaaacctatgagtaatgccaaggttattgagatacctggtgaaaggcctaaattcacctcctccatcactttgaacaactttaattttacagttgaattgaagttcaaccattgttttgaattggacaaattgagtaagtgtgtcagatttaagtctcaaagggaagacccaaacaaatctggaacaggcatctatacaagtcaagaagtaggtataacctcctaaagattggataggagctggtccccataagtcacaaactactaactcaaaaggttgagcatacacaatagtggataaagaggtaggcagtctgtgagatttgcctaaacagcaggcagtacaaaattcagctagagacttggggggtataggaatattgcaagtttttagcacttctgcaagagcttggtaatgaggatggcctaaccttgtatgccacaaagcatatttgctggtaggtataatattaggaacaatagaatgttgtggagattgagaattattaaatgtagtagcatgaacaagaggtgaattaacacaggaaacattgcttgtattcattgaaacagaaggagtacaatcagtaatacaatcactttgagcattagaatgaagtaaagtattacatgatgtactaggattacaattgtttgaacctaaggctacactagaattgaggctagagagagacttgaacttggacacttgagacgagggactctgaaacttgtaaagaccatcagcttctacaactccacgaagaagcacctcagaagaatcctgagatttaacaagacaaaaggaaggatgaaattcaaagaaaacctgattgtcttaggcaaatttactaacactaatgaggttcttggtgatgtgaggtacaaggagtaaactgtgtagagtgagtggtttgtgaggaaagttaggggaagtaaaattcatggaacctatagagttgatagacaaaccttggccattccccatgaacacttgctcagaaccagtcacagagtgagcatcagacacattagaagaatcaggtgtaacatgatgcgatgcacctgaatctggataccaccattggttgctgaaggttggatcagaactgcccataaacgcttgtggtggagaaggtctgggtgcagctggtctaggtgaagcatagccaaaagaaggtgcatacaccggtcgagcattcatcagaaatggattgaagggagcacgttaaggtgaaaacggtatagaagcggattgcgaatacctgtaataacagatagaggcgttatgaccacttttgtgacaaatctgacattgagacttaccaaaacggccacctccacggccaaaacggccacctccacggccagaacgaccgcctctgaagttataattattgttttcagcatgagcagtaacatgactagtgccagtgggaaacaactctgtagcaggagacgacagttccatcggagaagacgaatcagacggctgagcctgcgttaaattgactgacactggttctgtgagaattgctttccgatgcttctccaatctcgattcgtgtgcaaggagacaggattcaagttcatccaaagagctaagatcttccttactattgacagcagcaacgataggatcatatttctcgggaagtgcatcaaggacgatctcaattaggttacgaagaggaacgggatctccaattgagatcaaggattcattgatttcgcgaacacgctccatgaacgactcaatcgtgagagtacctttggagagacgacgcaattctgagcgaagctgacgtgctttcgtcgtgaggagcgtggcgaagtaacgatgcacttcagtccaaacctgccacgcgtgcgtgcagtcaacaagcttcgggagcagcgaatcagagatcgtggagagaagccacgtacagatgagagcatcttgttgttcccaatccagatatgcatcgttcacctcactgagattaggatcggaagtagaaggggaacgatgaggaatcaccggaaccgtgacgaagcgttgaagcttgtggccacgaacaacaccgtcaattttttgtttccactgcttgaaatttttatcatcaagcttgatggagataagatgtgagagtttgacatgagaagaaggaaacgcgccgtcgttgcgaaacggagacgccatagatcaagatcactggatcggaaaaagagtagctctagataccatgatagaatatcataaaagagaatgagagagagtaaagtctatttctcatatattgatcttatctgaaataatgaatacaatgctcttatatagagcagcaacaaactattgcataacagcatagcaaactaatagaatccagctggcataactcacttactaactatttaccttattcactctattatgaacattaagaaattgtagggctttactatatcaaatagtatgcatacttttgctgtgagatatcttctcattctgtgtgctcttaatttcttttccttctcatcattattagagtatgtacttgtacaactgtgaaaacagttttgtaaaatgattgtaagggctgttagcttttgctaacagcacccctttagtgttaaacaatagattatatgtttgtaagggctgttagcttcgactaactgcacctcactaggattagggagtcagagtctattagtgttagtttagagggtaagaggtaagaggtctatatatacctctgctgtaactaattctaactaatttttcagatcacaataatagcagttacacttttctctcatttctcttctcagcttatcaaatatggtatctagagtcaattttttgtaatcatcgtcccttcgcaagttccagatcagtgctttcatggcttccactccttcgaacctcgtttctcagtcgttcccaaactccattgccgaaaaacttgatgactcaaactatcttcactggcgtcaacatgtagaactagttatcaaatctcacaagttgcagtgtttcgttgtcaatcccgccactccacctcgctatctcacagaggatgatcgaattgctgatcgcgtgaaccttgattatgaagcttgggaggttcaagatcaagcgctccttgtttggtttcaatctacacttcatgagtactttagcctccatacgaagtctcgtgcttgacagcttcgcactgcaatgcgcacaattacacttgactgcaaatcaattgatgagtactaacacaaaatcaaaggatatgttgataaacatgctggcgttggagttcctgttcgtcacaaggagtatgttgatgcgcttctcgaaggactactgtcagattacgtgccagtaatctctgtaatcgagagtaagaagcgcactccatccattgcaaagatagaagctttactctattggtcattaaacttgtcttacgctctacaacaaagatgcacaggtgataagctctacgtccttgaactacactcaaggctattcgcaacaaaactcgtataaaactggtgattctcgaagttcatatggccgtggcggtggtttcgctgactgtggtgccagacatggtcgtggtggtggtcgatttgctaacttctagtgtcaaatttgtcttaaatatggacacactaccaatgtttgccattttaagtctgatataaattttcagccccatgagtccatgagtctctcacttctctgatcctaccacattcccacccattccttactccactagttcagtcagagcctccaatacctgggttaatcccaattccaaagttgttgttccaggccccaactaacccagtgctatgctcacaaattcctcctctcatgggaatggtcctactggctctacttggattccagactttggagccagttttcatgtgactggtgacttacagaacattaaacaattcactcattttgatagacccgatcagattttcataggcaatggtgaaggtttaagtatctctaatattggttcctcatcctttgtgtcccctgatgatgctggcataacatttaaacttcacaaattattacatgttccttcaatttcgataaatttgtcaagtgtgagtcaatttgtcaaagatagctctgttttctttgaatttcatcctcacttatgtcttgtgaaatctcaggagaccaataaggtcctccttcaagaagttgttggtgctaatggactttactcctttcataatctcaagcttcaagcaaaatctcgtctgctgttgtctacctcaacctctgtttcaaatactagcttccctagttcaactgctattgttaataataattctagtgtagtttccaattctgttgtttcttcttctagtattactaatctctgacatgctaggttaggccaccctaatggtcatgtaatgaaaattgtcttcactcattgtaacatttctcaattaaataaaaatttcacaggtttctgttcttcctgctgtatgggcaaatcttatagattaccatctcacaattttgtttctgtttaatcccctttagaggttattttcacaaatttgtgggtcatgtaatgaaaattgttttcactcattgtaacatttctccatcgattaaaaatttcacaggtttctattcttcctgctgtataggcaaatctcagattacttggttctcacaattctgtttctatttactcccctttagaggttattttcacagatttgtggggaccttttcatgtcacttcatatgctggttataaatatcatgtctcctttattgatgccttctctaggtacacctggatatttcctataaagtccaagcctgaaagtatttctatttttcaagcttttaagtctatggttgaactgcagcttaataacaaaatcaagagcattcaatctgattggggggaggggtgaatacagacttttttctactcttctagtctcctatggtttctctcatagactaatcttccctcacactcatcaccaaaatggtgtggttgaaagaaaacacagacatatagttgactcgggcctcacattgttgcatcatgcctctttatccttgcagttttgggattatgcctttactacaactgtcaatttgattaacaggcttctcactgcttccctcaactttgttgtcccttttgttaccttgtttaataaggatcttgattattattttcttaaaacctttggctttgtctgttttcctttactgagatcataccatacacacaaactgaattttcaatctcaggaatgcttatttttggggtattcctcttcccacaaaggttacaaatgtttgtcctcatctggcagaatttacatttccaaagatgttttgtttaatgaattaaggtttccctcttcctctaaacccattaaaaatcttgattcctattttagtctcaatcccaacctttctccaccttctgctacttctacccctcaatcctctcaaatgtcaccctctaattcagcctctattcctcttgttccccctagtttttctcctataccagctcattcccccatcacctctatgtttgtgcctcatccatccacttcctctgaacctacctctattcagccttaagtttcagagtctactaccccttgtgcatccacttcagagtctgtttcagcacctagttctatacccagtgaatacacaccctatgcaaacaaggtctaaatctggaattcacaatcctagactacatccttctttatttcttacccattttgaacctaaaattgtgaaacaagctccagaaaatacagattggctttgcagcaagagtatgatgccttgttgaagaataaaacttgggacttagttcccttacctcctaatagacaggccattggttgtaaatgggttttcagggtaaaggaaaatgctgatggttccattagcaggttcaaagcaagattggtagccaagggatttcatcaaattcatggttttgattttcatgagacattttctcttgtgatcaagccaatcactattcgaattgttctcactcttgctctgtcccgtgggtggcaattgtttcagcttgatgtgaataatgctttcctaaatgggtctcttgaagagtctgtttttatgatacaacctcttggttttgaagttgcagataggtctttagtctgcaagctcaacaaagctctctatggcttgaaacaggccccaaggcaatgatttgacaggctgaaatctacactgttgcagtttggttttgttgggagcaagagtaattcattcctatttatctatcggcaacaaatgcatatagttttccttctagtctatgtggatgatataatcctcacaagtagcttagcctctctaattcagcagctcacaaacaaactacacactgcattctctctcaagcaacttggtcatttggattatttcatggatctagagatcaagtacctatccaataattctatcctgatgactcaaagcaaatacattcgtgacttcacaaaactcacatggctgaggctcattctatttcttctcccatggtctccaactgcaagttatcttgacatggtgctgatgtttttcatgatccaactctatacagatctgtgattggtgcattacaatatgctacccttactagacccaaaatcagctttgctgtcaataaagtttgtcaatttatggctgcccctctagactctcattgggcagtggtgaaaagaatcttaagatatctcaagggcactttgtttcatggcctacttctattacaaagcccttggttattcatgcattctgtgatactgactgggcatcagatgtggatgataggcgctccaactcaggggctgctaaatttcttggtccaaacttaatatcttggtggtctcacaaacaaaaagttactgctaggtccagtactgaaactgaatatcgcagcatagctcaaacttcctctgagttaacttggattcatgctctactaacagaattaaaagctccattctctactcctgtgatcttttgtgataatcagagtgttgtctctattgctcacaatcctgcatttcacagtcgtacaacgcacatggaaattgatgtcttcttcataagaggaaagattcaggccaagcagctctctattgtccatattccagctttggatcaatgggctgatgtattgaccaagcctctttctgcatcaagatttgaagttctcagagacaaactcaatgtgaagagtgtttcttctgaaaacttgagtttgagagggggggggggggtattagagtagttgtacaactgtgaaaacaattttgtaaaatgattgtaagggctgttagcttttgctaacagcacccctctagtgttagacagcagattatatgttcgtaagctgttagcttcgactaactgcacctcactaggattagggagtctgagtctgttagtgttagtttagagggtaagaggtctatatatacctttgttgtaactaactctaactaacttttcagatcacaataatagcagttacacttttctctagttttctctcatttctcttctcagtttatcgaataatcattaagattcttattttatgaaaatagtataaattccgtgttctcttgctcaagtgctaacctttcaagctatgatcaatgtgtcttatttatagttattaaaagtagtattttaaaaattattcatttattgactttttttattaaaaaaaaagtaatatctgtagtggtttatccttagaggcactgttgcaatgtaggttaaatatacttgcagagcttgttcgatttggtgatcgtgagttctataaagattggtggaatgccaaaactgttgaagaggtaggctctgtcctggcatgttcttggattgtttatttaaaagcactttcttgaagagaacttatgacttgtgtttgctgaatgtatttctgctgctgatgctgccatcagtattggaggatgtggaatatggtatgtttccttttcagatttgcctgtgtgaaatgatatacttgcccagttttcagatgaaattcttgtcaaagtatatatatatgtgtgagattttgatataaatatgcccattaggtatagccatggtattgtaaggctattttaacaaaaaaaaaagaaattaggaagaaagataactttcagtattttccaagtattctgtcttaaatattccgccatttacttcatatatggttctgaaaccatatgccagaacatatcagcaattgtttataactttcatttgtagttctaaaccattaatattcaactgaaaggatttttttataatgcagcctgtgcacaaatggatggttcgccacatatattttccatgcttaaggcgtggtatacccaaggtaaaaagaagcatcctaccatattgcaagtggaccctaaaatgtaatttttaggcaaaatttaggcgcaaatgaagagcatgtcttcaaaactttctgtttttagaatatagttagtctatcatgataaataagtatgtgtaaaaaacaatttataaatatgctatttaattaatgtgaaaacagaaattaggtgcaaatgaagagtatgtcttatgttgaattgtaactgttgtttttctcaatccatcagtattgtagcttctcagttttgtgctttggaaagcatgaatggatgttaagaacctgtgaaacggcaatccaaacacacacttagttgtttgtgaaacattttcaactgatatactatattcaaactcagcattttttgttttgtcacttcagatattgaatttggcatacctagttacatgaatgatgaatttgcatgtgggttgacaagattaaacaagaatagtagaggagctcactttatttttctcatgttctataatcttgttctttgttattttgggtctttgctttcagcttgcttttcttagttccttttgtatttgtgattgtgattttcattgtatacagggtgctgcttcattaattgcattcctggtttctgctgtgtttcatgaggtgtgtcgttcatctctctttctacttccccaacgagtaatgatatttagacactcacatattgcaaacacctatttgacacctttgttttctctcaatctctttcttcatatcatctatcatacttatacttttctatcttctctcttgaggtatcaaatagcacatgggtttctatttatccttatccttcccgaattgtcctctcctttttggtagtttgctataatgtgattgagtaaacaataaaattgaatttagattatcttaattttgaaaaactagttttaataaaaaattggtttgaagcaaaataatttatggctagatatctcatatctctgttgaaaagtaatggcatactaaaaaagggtaattaactctgttcaccacataagcatcaatgttttacttctactcaaacttccatttgaactaattatgtaaatttcatggaaaataattgcctaattatcacaattacgtaaattctaaaattgtctaattaccataatttaagttatctaacaatatccaacaactgcttaattgccataactaaagaaccactttgagacactaaggcagaagaatcaataggtctagatagaacatccacaacaaagggggtccggccattcgggtggcacacacaataaagtagaccacatagaattcaaagaaggaacgataggaggacccaaaatttggttagaagaatactccgcaagtaacccatataaggtcaagggcatgaaaatggtcttctggtgttcatgctcctaggctagggtggctgtaggggacaaatgctctttgaagtcatatgaataagactgtgaactttgcctaaatattcagtcataggaccatcaaggtggtgaggggcaatgatattcatgaggaattgacgaaccccattaaggcgttgagtatcattggtgtaaagaacctgtggtctgttcccaaacttcttgacaagtctcttgagcacaaaatatatgcttcagagtggggttgaacggtggttttcaggacaccacacagctgggcatcaatcttgttccagaaagaacggtcaacacatgggatagaatcaaccttcgtggcgaggtgatcaacatagtcttgacccttatgccaaaccttgatcccatccaacttgtcaatagagagtggaacagagacatggtgaaaataggaggctcaaccttgagaggggcagaagatgccatgggttaatccagactccagaagagagatgtacagcctgtaacagcaagaaaaaaaggaaaataaaaaaccacaagttggggtagagcacagcgcgagcatgattgcgtttacggcaacaggaaaaggcacagaaggcagcaacactacccggacaccagatagacatggtttctggaaaagaaaataggcaccaatgaacagtgactcccccaggaaggcacgaaataaggtctcgttaggctctagagagaaagcaggagacatgactgaatccatgtcaatgtacacagctgagtgtattagtttggataataataattacagagaaaacgattgctaattaccataattatgtgaatcctaggatttcctaatgaatataattaaagatatctagctttttttatttggtacccataacatttttgtggagtttccattagatttgcttatgattaatctcgaaaactggtcatctttaatagaattttctctctcaattatgttttttccattcataccaacaacttgttgataaagatatctaattatagccaacaattgcctaattaccatagttaaatatatctaaataaatactatcatgttggaataattgattttttaaatctctgtggaaaaaacttaaacatcaattaatttggactagagggagtaaaatatatagtggagcaacccctgtaaagtgcttaaatagagatgcccttatatggtgttcagatactcggcagactattatgtttctagtttctaccagtgtattcatacttattattgccattgtttttttagttgagttgagtcatttgttgtacagcttttcattttttcttcatttagcaattttgctcataatttctcatttaactgcagttatgcattgccgttccttgccacatgttcaagttgtgggcttttataggaattatgtttcaggtaaaggcttattgctatattctctttttgtccattgaaattatctatttttaagcttcaattatcaatttatcattcaagtataaaatttgcacaaattttcgtagaacaataaacatcactttatataagaaacgaaaagctggagtgagagtttaattcatgttatatggccaagtgaaagatgttgttctctagacaaatttgtgttatcttaagcacagttgataacttaattatgatatctgtatttttagttcacttgacatgataatgacaaatgtcttttccctcctccatctaggttcctttggtcttgatcactaattacctccaaaataaatacagaaactcaatggtatgcctctaaagtgtcatatttaagaactttggtctattaatgaggtatcttataaaccttcaagttgatttattcgtttttaattgttattttatgcatgccaggttggaaatatgattttttggttcatattttgtattcttggtcaaccaatgagcgtactattgtactaccatgacttgatgaatagaaaaggagaagttgactaaggtagcattacactgttcatgtggatgagcttttgcgttttctgagtaaaatcgatgttgatatgttggcttctttgttttgtatggggatcaccacctgttttgatagtgagtcctctgggttgcatttccatgttaattgcctagtctttcgagcttaattcatcttgatgtatttctttgacttagttgctttggcgcttttatcatgaaagcaattttggaagcaaactaacgaaatgtcaaacactaactgctaaggtaacactaactactaagttgagtgatatatagctgtaaatgccaaagttggtttaactgtatctggtttctggaagttcaacctatgaatcagttggggatctaggattctaagttaggagggataatttatttaaaaaataaaatttaataatttttatcatgaaaggaggaaaaaattaggtgtagagggttcaaatatacaaaattaggagggacaaaatacaggtatttaagatatttttatgtaactttttaaaagtgagggaatgcatgtgtaccccctaaaataagtgtcaatctgccatgaatggtgatggttatcattcaatatgaaacatgttattgcactaatagcatgttaatttcataaaatgaggaattgttgcgtaatagttgtggtaaaatcgttgcgaactgccgagctacatttgttttacctgattcttgaatcattaaaggcggttccgtgagatctctcattccctcttggcaaacaaggtttgggattcattgctttattgatggctttgcggctggcatttaatagaaactagattttgcaactgtgcacctgtaagtatttttctgttgtgatatcaattttaacttttaaaattccactatattaagtcaatttttgagattaaagaaaaatatttttgcattttttcctatctcaaatcggtatcatgaaaattaaaagatgagtaagattaatgtcaagtgaatatttattaaagaataaaattaaaagtctaatcttaaagtcatgatttttttacatattatacttgtattataataataatcataaaataaggataaaaatattaaatgcgaagaattcaaattacatttacatatcttcattttctatataaagaaaaagccaccttgccttatgcgacatt

SEQ ID NO: 387 - DNA, 23534 bp, Glycine max; identical to SEQ ID NO: 386
  source 1..23534: mol_type = genomic DNA

SEQ ID NO: 388 - DNA, 10265 bp, Glycine max
  source 1..10265: mol_type = genomic DNA
ggaaagaaaaaagagaaaaaaatgtaagtataataaaatttaatatttgatagaaagataaataaaaaaaaattaagtggtaaaaaaaatattttgaataataagatatttgggtaatctaaaatctcatgcatttatcataattctcagttagacggatcataatgaattattttgttgcttaatatgttgacacttctttgattatttctttcaataaaaatccaaacactgtttgggcatattatgaaagattagtcctttataaacccgtcttagatttccaatcctcaccaccgctttgcttaatttattcgaatcagattcctttttatctttgcgtatcaacacgacaaaacaaacaacacccactatcttcttcttttttcctctttccctcttcctccctactctcaataaattaataaatatatattattattagttaggcttcctttatcatagacgatttctttgcatctaaaattttaatttttccaattactttataaaaaaaaagtaaatacacttaattcaatgtcttacaaatataaaatgcattgagcacttattgcatacaagaagttaggagatttggaattattttattatataatgtgagtaataattatataaaaaacaattaccttattactataatgaaaggtatctaacaatttccaaattatcataaataaatatttattttatataactaaatttcttaataataaatatattttaatatataaactaaattataattattttttagacaaaaaataattagaatttataataaataaatatctttatatatataatttatattttaaatttatgaaaataatttatattgttatataagattaatttatattgttatatatatactagccagtattttagtagcatgtacacaggtaaattctattttttttttaggtaaagggtaaattctaatttatatgtagaaatataaatagattattattattaaagaacaatagaaatctgttgtttattttttggtgaagagaagactgagttagtaaacacgctcgctcggtcttcttttccaatggcgatttccgatgagcctgaaactgtagccactgctctcaaccactcttccctgcgccgccgtcccaccgccgctggcctcttcaattcgcccgagacgaccaccgacagttccggtgatgacttggccaaggattccggttccgacgactccatcagcagcgacgccgccaattcgcaaccgcaacaaaaacaagacactgatttctccgtcctcaaattcgcctaccgtccttccgtccccgctcatcgcaaagtgaaggaaagtccgctcagctccgacaccattttccgtcaggttctcgccgttaacttctactttacaattattacaattccgtaactatttcaaactcaaccagaacggtaccgtttcgttcccgttctgcattaataaactactcaatctcaatgcatgactcatgaatgcaagcgactcgtagtcttttaggtgcttaaaatagtgtatgctactgctagttagttaatttgtgtgtacgggaaactagttatcaatttatgatttgaatttaatacaattgaattggtggatcaggtttttgtacctgctattgtgtttggtttataattaggtgtgatgagtctgatatgtaattatatttctttactaattattcaatcagttgcagagtcacgcgggcctcttcaacctctgtatagtagtccttgttgctgtgaatagccgactcatcattgagaatttaatgaaggttttgcctcttccatgtttaattgtgcattcacctgcaacaattttctgttctttttatttatgaccttgattttgacggttcgggttttgttgtctgctttaatgagtgttttatttgttctgcagtatggttggttgatcaaatctggcttttggtttagctcaaagtcattgagagactggcccctcttcatgtgttggtaatgagtgtaatgaattccctaaagaattaactatgtactatgtaattattctgaaatgttgttcaacagtatgtggttgtgcacttggtttgcagtctttctcttgtggtatttccttttgctgcatttatagtggagaagttggcacagcagaagtgtatacccgaaccagttaagtgatcaggccatatgagcttttattagatttcattcgttttataacctaaaatatttttgggatatggttagttgtgatgtgctattcttaactgttcaatctttaatatttgcatacatgagaatattatattactttaatattgcaggttgttgttgtacttcatataatcattacctcagcttcacttttctatccagttttagtaattctcaggtcagttaagttcttttgtatatattctggggctgcagttgaggcaccttttgttttgacatgggtggttacacaatgtgtccattttgaaagaatttggtaatagaatatggttttaagttgatagtggtgttaagtaacaaactttgtcactatcctgcacaggaatttaaatttttttattatattttaaaattacttgagaagaaatttaaagcatttgggtgaaccttagtttaatgtttggttcttatcatgttggaattgaattatgttgcaaaatatgaagatgaatgctgagggatgaaataattatacagttgtgcattcttagtcatttcatagataaggatatcccagaaagatgattactgacttgtaacattctttgcaggtgtgattctgcttttctatcaggtgttacgttaatgctatttgcttgtgttgtatggttaaaattggtgtcttatgcacatacaaactatgatatgagagcacttaccaaatcagttgaaaaggtaataaatactctctgtttaaacggagagaaaattttgaatttttttttcttaaaagtcaacttttctctcttgtctttaactaaacaaaagaaaatctatctttacgtgttttttctttcatctaattttttccttaaccaaacatattcttaaattctacttggcacttgtaagtgggtagataactatcacaaaatatcatcgtcacttatttgtatactttaaagatgaccatatgttgtacaatgtttgtgatgattagtttttgaacctgaacatcctgcttgacttagcagtagcttatggatcatgtactcttaaaacttcattatatgctgaagtacagttttatttcatcttcatttgaattacttccatcctgtgttccgctttattgcttccttctatctagatggttagctcttcaaacgtgtgaatgtgtgatagataaaccatctgctttccctccttattcaaacatgtttcatgtgttatagggagaagctctgcccgatactctgaacatggactatccttacaatgtaagcttcaagagcttagcatatttcctggttgcccctacattatgttaccaggtagcagtactttcaagtgatttagttaatttttggaagcaattttttttaattgttgtggtgttgcctcatttagattcgcctattttacatttgcattcacttttctagtcttagattgcttataggcacaaccatgtggagttgcttactcatatatctttggtgtggaatatgtctgaggtttttagtcagtgtctaattggacatgctgttgggaacccagaaacagagtatgagaaaagaatgcttcttgtactaattacagaatattgaatgacaacaaagaaaaggggaaaattttgctcaaagagtttctcctttcacaacacagatgcttaattgaatgactcccccccccaaaaaaaaaaaaaaatcttcctatatgtttctcactaaccccctctaactaagaatcaaactaattgctctaaccatcccaactaatttcactgctaggaattaagttcccatctaacaagtataattgatccagaatgttgggttggctacatagtaggatttctctgaatgactctttaatcattgtcttcaatacattctatacctttcagcaaatttctccatttattatcctttctttcctttccatcttctaattttggccatttgacctcgttcatctcacattcaatactcctttctattttgtagcatagaatattgtgtaatgaaatctatagcaggaatcccccaaacccttctcatgccccccctttacttccttcgtacaaaattcccattgcaatctgctagtttctagacacaacctgctagtcaatgcacggtgtaggagccacaatctgttagtctatgtgttcctcaatctgcatataatacttcttgcttcttgcttttatatgaagctaagaataagattttaagggaatgagtattacatgactccccggcataaaatgtagcatgcatttctaatgctttgtgagaatactggattggctttggcatcttcagtgtttacctacgttgcagaaattttgcttggggttctttaagtaggtttctgcagttcatttgtctttgcattttcctgcataaatgtatctccatgtgaattgcatttgttattttttttattctgagagcaaggtctttcacatttttatttgcatgtattttgttttatgaactgctcttttagccaagctatcctcgcacaccttatattcgaaagggttggctgtttcgccaacttgtcaagctgataatatttacaggagttatgggatttataatagaacaagtaagcagttcctgttaataaattgtgttcatttctacctttttttcatttctttttttatgtacatttttttcttgaggtctatttcaccaattctactggtattctgacattattttgactgtaattttgcagtacattaatcccattgtacaaaattcacagcatcctctcaagggaaaccttctttacgccatcgagagagttctgaagctttctgttccaaatttatatgtgtggctctgcatgttctattgctttttccacctttggtattccatctcttgtttggttcaacatgtgtgtatgtgtgtgcattttccttacaagatattagtatgaagttatcttcacctgccataaattgaataattatagttctagtttattttgtttgatgccttgacttttgtaccctggcaattttctgatgatgatgatgttataagttagtaattgattaatctttcaaatcatccttgaagtgatatccaccttcctaaacaccttaaaatagtaattacatcatcaatgggaagatctagctgatctaaaggtgtgcatgtagagactattggtgtcttgagtgtacacttctaaagatataaaataaactttatagcctgtttggtgtgccaccaatgattaatttaagtgacactctgacggatatgtgaaaggatttgagagccttattttattgatggatttgaatatttttcctttggccagtgaggatatattattcttcatttatgctcttttttctcctctttaagaactactcttagaaaaaaaactagatctttttttgcaagcataaatgctgatctgcttgtctcatttgtagatattagaaaaggttcacctttgattttttaagatttagttaatatttgaggaagcttatcattggagtgactgtcgtaatgtaggttaaatatattggcagagcttcttcgatttggtgatcgtgaattctaccaggattggtggaatgccaaaactgttgaagatgtaagttatttgtcctgatattttgtcgtttacttacagtattttcagtcttcataaagagaaattgtgactttttgtttttgtttctgtatttgtgctgttgttgctgcttccatcagtattggaggatgtggaatatggtatgtctctttttcagacttaattttgatgaacaaattgattttcttgtgttcagcaaaatgattttcaggtctcctgttgggatgaaattcatgtgaacacacgtacatatatttgatataactatccctttaaatgtataatgagggttgacaactctccaagactattttaacaacggaagaaagagaagttacaacttttttccatcttactgactaaatggttttaaaactgtctttcagaacatatcattaattatttatcacgtaaagttccaaaccattagtataatctgagcggaatcttttacattgcagcctgttcacaaatggatgatccgccacctatattttccatgtttaaggcacggtataccaaaggtaatcaagcatccttctgcgttgctgaatggatcctgaacttatttggtactgtaaaacatttttaggatttgtcagcctctgtttaccatctcgggttgctactaagatcatcacatttaacatagttgaattaaaatgaacatgttacttttatcctaataatcacacttatgtaaaaacttatcaataaacctattacataagttttttttcaaaaaataagtatttgcactaattgtatggtttgatatgtttggtgcactgggggagctatatgtagaaagtttgcaattggtagacagtaatttagcttcatcttctgttctgtcatttcagataaattactttggagtgcataaacatgactaaaacaagaattgcaaaggaactccattaaaaaaaaaaaaaatcttatgtaatcatgttcaatagctttgtgatttttttccttggtctttgccatcaacaatttcctattaacatatagttgtttctcattggttaatatttggattggctctttttttgtcaagcattattggtatttcaatttttagttctagataaaatttttatttttcatcattgtacaggccgttgctcttttaattgccttcctggtttctgctttattccatgaggtgtgttgctcatctctctgtacagccttctctcttctttttttggtattatgtcattatggttgttctgcttgagtgtttgtctgcatcctacactgattgaagtcaaactgtatcttgcaattaatatatttttggagtatcctttcctccttttccttgggctgtttggactttgctaagagttagatagaagggaagggaaaattagttacagatggttagagtagttgattagtcagttataggatttggttagatattaattacggggattaagaggaaaggatccattctatctagttgattagtcagttataggatccattctatctagtatcatttgagaattgagcttggctcttttgaaaggagaaatcctttgtgagggggaaacccttggaggagaattatctcttcttttttctgttctagatgataaaactgcccttttatttctttctttgctttgggttcgtaacagactgtgggagaggactgaaaattagatactaagttgtggctgatttgttaaaaattggtataggacccatgctacttgtctttgaactatctacaacccactatggccccagaaaccttaggcagctagctaccaaaatctgtagtaacttgcagcctgtctgtctgtaccttggcaggtgtagatgttacagcttccatatcttatatcttaaatatagactgacataacaattatgacaaactgttatattttctagttgctagttcttgcaatattaattttggcaccaaaatttccctacatgtactcaaggatgcttactttagccatgaataattttttttttcacgtgttgtaattatattttcaatttatcctgtcattttttcctgaaaaaggtacatacacagaataatttgataacttaaggtggcgcttggtttgagtgttttgtgttttcattttcaaagaaaatagaaaataagagtgaaaatatgtttgcctaaaatttagaaaacattttctatgaaaatatttcaaaaacaagcccaaaactgaaaacaaccaataaactttttcagcctttttctgaagaagtgaaaacacgatgtcactttagagtactttcttctcaaaacacgttttctaaatcttgaaaatctgaaaatgaaaataaaaattattttgagaaaatgaaaacagaaaataaacattcaaatcaaacgccaccttaattgtcatagacagttgtgcaatttttctcacgatatctctttcgtctgagtgcagctgtgcatcgctgttccttgccacatattcaagttgtgggctttcggtggaattatgtttcaggtaaaatcaaattaccgcactaaacttttgttttcccatcttctattattaaactaaagcattttaattcagagtaagagtaacacgaattttccaagaaaccaaacttctcccctcttccctcacgaagaaggtgaaggattgccgagatttttttttcctgttcttttatggccaaacgatagaaagtattctctggaataatgaatttgtgccatgtttgaaagttgatgattatgatatcatccatctttttggttcaattaacatgataaggaatgacttttttctaggttcctttggtcttcatcactaattatctgcaaaataaattcagaaactcgatggtacgtctgctatttaagcatattgattcataatatatcttattactccatcatcttgaatttgattcattggttttttaatttgtttttgtcttcatgccaggttggaaatatgattttttggttcatattcagtattcttggtcaacctatgtgcgtactgctatattaccatgacttaatgaataggaaaggcaaacttgactgaaggtgcacgtggataagcttttctgtttttggagtgtataattgatgtcgatatgttgatcaatattgttttccacgagtactttcatctaccatggcagtggctgctctgaaggatttccacctgatataccaggtcgcgaggctaattcatcttgatctatgtacttatcaactctcctctggcaattgtatcgatatatgcaattttgagagccatacactggcattgataactgccaaggaacagtgtagctgttttctgttaaatgttaattagtagagagctagatgtaaataatttatgctcaatatatttatttcttcctattcttcaagttccacggatgaatgatgatgtctttttatatagctgtttctttctgctacaaaacttacataacactttataggtgctgtttatgttgtttgctaattagaattgaagtttcaattcgataatcttcataatgaaggttaacatttaaaaattatgtaaattatcaaaataaaactataattctgattaaagaagactacaaacaacacttaaagaattgtaaagttttcccctatacccttaggatacttggaatgtttaaaagagtgctttgcagaaaactttagtaactgcaagaactatgtccaattttcattgactaaaaatagtttgatagtttatgcttgatctaaatctctcaatcaaaaaggtggcacgtgttgaaggttactattatcatttttcgtttaaactttataccttgttattgattactttattaatgattaataaatatttacaatatcgttaactgattaatgacatttttaacaataaaggttagttatatataattaattaataattaactcttgaatagctaaattaaatataacactggaacgtgtttagtcaatactttttactagaaccaacaagatctagtacaattggtaaataattgaatttttgaagtatgatgacagacattcaattttaggatggtaaaaaagattttattggaagaaacaaaatctattttaatgatatctatgcttagacggttgatctcataatttagattttaatgatttctatgcttagatggttgatctcataattttttgctagcaggataccttactttaaggagaaaaaagaaaactaaaaaaaagtgaggtttgaatggcaggttaagtggcaataaaatgaagtagcaggagcacctgatccaattaacacagacggcgtgcttatcacgtgacactaatgacgtggcacgtttcaattggcaccttgatccacgctctaacaaaaccaaagccctttatttttagcaccgacgcgacgccaaaaaggcatagtagtcag

SEQ ID NO: 389 - DNA, 10265 bp, Glycine max; identical to SEQ ID NO: 388
  source 1..10265: mol_type = genomic DNA

SEQ ID NO: 390 - DNA, 3789 bp, Glycine max
  source 1..3789: mol_type = genomic DNA
tagtaagaaaatgcgttagaacttactaggggaacgtgtttctctaaatgtttcaaataataaaaaaattgaagttaaatatagttaataaaaaataataaaataaaacaaaattaacaatataaaagtaatagaaaattaatgtagatcagaagaaaaatataaaatttaataaataatttaaaaataaaattatctaataaaatataaacatcatgtcaaatgaaaataattctcgttattaatagtgacaagtaacgcataataacattggttcttttaaaactatctcttttccttgagtatcataaaacgaaatgatgcatccgtcaatcactatgattcatatgttttctttttaaaaaaggaagattatatttttattggcaaaaaatacttttatgtatttatataaaagaggaagattctgattcatgttcccaaacgttaattattttgattcaggtctttttattatattttccatttaagatgaaataaaaaataactgcaaaataattattttgatataagaatgtggttgccaattgtttactatatttatatttatgtgaagattttattgttcagttaacaaaacttaaatgctacaggatttttataagttataactatatcttgcatgtctatcgctatcaagattttattacaagcttacaactagtataacacattgaaggaacactggaatgttctaatgttacaagtctacaaaaaagataatataaattaattaatcgtttattcaattaattaattaaccagtgaaagactatatctacaaccgcgtgagtggaaacgaattaactaatcaaggaaagattatccattatccctcaccgtgggattccaaagccatctccttaaccgttagattacttgagagtgcaatggcgacaatacccccccgaagctctatataagcaaccacagcatttccccgaccatcacaacaacaaaccaacaaagatcttccttacaaaagtttgttttcaaagtgtgttttgtttcccaaatcctactcttgtgaccacaacccttcctcctctttcttttgaaacctctttttttctattccccaaccaaacaagcaaacgctactcactcatcatcactgagatcatggctcctaatatcaccactgtcaaaaccaccatcaccgacgctcaagccaaggtcgccaccgatcatggtcgtgcctacgtcaccttcctcgccggaaacggtgactatgtgaaaggtgtcgttggcttggcaaaaggtctgagaaaagtgaagagcatgtaccctctggtggttgcagtgctacccgatgttccccaagatcaccgcaacattctcacctcccaaggttgcattgttagagagattgagcccgtgtaccccccagagaatcaaacccagtttgccatggcatattacgtcatcaactattccaagctacgtatttgggaggtacgtgtatatatatatatatattttcttttatccacgaatgttaatttgttttgttagctttattataaatggaaatgggtgaattcaaacccattattttttgtctctttccatttttctggatcaatcttagtaggtgtgcatatacaatatgtatgtcattactttgtgtttgatgaggagtttaattaaattaacgtgcaatttttctttattgtatataccagtttgtggagtacagcaagatgatatacctagacggtgatatccaagtttttgacaacattgaccacttgtttgacttgcctgataactacttctatgcggtgatggactgtttctgtgagccaacttggggccacactaaacaatatcagatcggttactgccagcagtgcccccataaggttcagtggcccactcactttgggcccaaacctcctctctatttcaatgctggcatgtttgtgtatgagcccaatttggctacttaccgtgacctccttcaaacagtccaagtcacccagcccacttcctttgctgaacaggtatttaattactgagttaattaatcttatacaatattaatatattataaggtgtaaagagtatatttatgttggattattggattgcaggattttttgaacatgtacttcaaggacaaatataggccaattcctaatgtctacaatcttgtgctggccatgctgtggcgtcaccctgagaacgttgagcttgacaaagttaaagtggttcactactgtgctgctgtgagtgttcaattttaattgaaatgaaactggaatttaaactttggtgtacagtaagatagaaattttaatttggttgaattggtgtgacaggggtctaagccttggaggtacactgggaaggaggagaatatggagagagaagatatcaagatgttagtgaaaaagtggtgggatatatatgaggatgagactttggactacaacaatccactcaatgtggataagttcactgcggcacttatggaggttggtgaagtcaagttcgtccgtgccccatctgctgcttaagagtgtctttggaaatcaagtgtgatccaagtacatgtacaaagtcatacatcattacattaacttttatgtatttctaaaagtcatacatcattacattaagttttatgtatttctaaagtcttaagacttaagaggaccttttttatgtgtcccgcttttctttttttctttttccaattctgtcattgtaaagcagtgaataccgtatccttaattttataaatggatatgaattttattttgtactttctcttttttcctttgctgattgatctatttccttttacttccatgataaagcacatgcgcactgtaacggtgaccgttgttgtgacaccaattcttagtatcaattaccaattaaccttgcatacgtacaaacgaaaatgaagggaaatagtaaattaaaaattaaagctttcactgttgctcctcctcctcctcctcctcacattagttgcttgaaatttcgcctgtacaatcgcatgacctgctgggcacgttaatacttatttgttaagcatgaaaggggatcacataaaaccaattaaggtgttgttgttgaatcaaaataattaagaaacttattttgatttggaacccgtgactatacgttacaacattaacaaataatgtgtaaatagcataatataaaaatatcacttggagagcttttggatttatcaaaggtgcaggctctggtgccttcatttgaaactgttatggtgcctttgaaaatacaaatgagatgtcttcatgtggattcaccatttccatgtcaatattgagctggccgttttaaacttctcaaatattatatttgtttaaacaatatttttaggaccttatgaaaaaaaatctttttaggacttgattaataaattaaaacactttaatgctaatatttatttgaatattgtaaaaagtgaaattgtttttactattttgttctctcccttgtcggagagtcctaggcagtcaagcacgataggggaagagcatgaacatgtgacgatgaaagtcttgttgaaaatcaaaggttatttgccttgtcttgtttgtgaatcattgttaagtctaaagtccaaacctatattaaacttgtgtaaaaagactcattgggaacgcatagaactgaacagagtgaaagtgtactagttcgaattgttctgagatgcttttagttggtttttcttttcaacataacaaagaactgtggtggaggattggtacctactaaggc

SEQ ID NO: 391 - DNA, 2481 bp, Glycine max
  source 1..2481: mol_type = genomic DNA
taaatttaatatgggattttaacagcctacatcgatcatgacttgatctaggctaggttatatggtacaaatcaagttttctcggattttttcctcatttaatcataaccttgagttagagtatttttgtaggaccaacaataacttgtggtcacttacattggactcgtgaccaactcaattagaacccacttgataaaatatatgattcagactttaagttttgagcacaaattagatcttatcttttttgttttttttatcacaaatacgatcatagcatgatatatatatagacttggcccacaaaaacttaaatatttttttatggtatcattccaaattccttcattacaaccttgtgaagaatctcacatctttttagtgattaaaaaaaaattataatattgcttacaatttaaaactgaaacaaaataaaactacaaaattaaaaattgaaaaatgattttgattttgattttttaaaataaaaatttaaaactaaaaaggttaattattctgtggtccctatacttgtaccaaatttttaattagattgttgaattttttttaattgaatctctaaacttttgattttaattggatctcccgtttaattgatgttatgaaaattaaccacaaacatataattaatgacgtagacaattgactcatacttctaaattaaaatatgttaaaaatatatttgagtcagtactaggctaacacctgaacctcttatccagttttccctgtataaaatgctaatagacacgcctagcccaacgtgggagcaaagccagccatgatatcctgcatgtgtgccacctttgaaatgcaatgcagaaaagaaccaagatatcactattcactactgctccatgactcagaaaagaaccaagtcatcacgtttccatctgcatgcaaatgatcctcttaatataaataacccacttcagtggctcttttaagtaatctcttcacagaagaaaaaagagaagaagatgggtttgaagaacaacatggtggtgctaaaggtgtgtttggtgctacttttccttgtggggggtactactagtgccaacttgaggctgagtaagcttggcctgctcatgaaaagtgatcatcatcaacactcaaatgatgatgagtcttcaaaaccatgctgtgatcaatgcgcatgcacaaagtcaaaccctcctcaatgccgctgttcagatatgaggctgaattcgtgccattcagcttgcaaatcttgtatttgcgcattatcgtatcctgcacagtgtttttgtgttgacataaccgatttctgctatgaaccttgcaaacccagtgaggatgacaaggaaaactactaatgaacaagtgttatgcatgtaagctctctctccaacggacaaagccccctttatgctttgtttgttatgtaaggaatgactaaataaacttggaataaaacttcctctcttttcgtggcccataatttgctttctgcaaatctgggtcttcttcattccaatgttaattaatttggccaattttaatttatagtttttcgtttgcatttggttctatgatttcaggatttataaataaaaaaatgtataagttaaccaaatagtacctaaaaacattttcgtggaacacttatatgagttgtttaattaatttaaataatgttgtttaactttttttgattggaacaagagttccctaactatacaaacaccttttgtataggtagtgcccaatctgaactaccaagtacaaattaacttccttccattttcttactctcaaatgcacaagatactcctctgttggaaaataaatttgtatgttcacgatccaagtcatcatataatcaattctaattttaataataaagtattattttattttcattatcatatttcagtatttgattaaatgatccatttgataatatccttgattaaaattaaagacttattattataatagagattatgataatgagaaataagtttgttctaattttaatctaaatcgttttttatcataggattattgtaaataagatatcaataatcgggatagattaatatatatgtgatagtatttattagataaatattaatagatctcatttattaatttgcatatatagatgagttacatattgatgtgatcattgaattaactcaattgaaattttctaatgattaaaatttaccataaactgtcaatagaaaattctcaagaagaggtataatagttttctttgacctgagattgtcatagtaattaacatgttatttgttgtattttgattctggacacctaatgctttagagcacttgttgaataaatattggatatgattaaatacctgtagaattagtgattaatcaagaaggaatccatcaactcttggtaatgagtttgagttctatgaataaaattatatcctagccaggaaaattaaatgaaagaaga

SEQ ID NO: 392 - DNA, 10134 bp, Glycine max
  source 1..10134: mol_type = genomic DNA
aacttaatcaagaattgacgtattattatatttatcaagctatatatataattagcagttattacttaacagtgagacagagtagagaaagcgaagaacaagaagaattttgcatggaatctagcggttgaggaatggaacaaaataaaagcgactggtgtgagaattggaagacgaagacgtgtcgaagaacttacttcttggccgtactcgtagcgattaagaaaaagatacggtacgtctcaacttcaacaatatctttttgcaaacactaaacatgacaaagacaaatattccttattagaatttgtttcaatataaaattaaaagttcttttgagaaaaaaaacttgtatatttttagtaaataaattctaagcaatagacccttaatctttcattagtccctttctcctcttatgctcaattcccataataattttttccgcttataaacccgtcttagatttccattttccaatcctcaccaccgcttttcttaatttattcaaatcagattcctcaacacaacaagacaaacaacactaccctcttcttctttttttctcttactctcaataaatttatgtcattattacttattagttaggcttcatttatcatagacgatttctttgtatttaaaatttaaaattttccaattacttaatagttaatatatttaatttaatgtcttataaatatagaatgcatcaagtacttattgcatacaagaagtaagaaatttgaattatttgtaaatatatcatttatattttaaatttatgaaaataacttatattgttatataagattaattttagttattgacatcgatttaaaaaatattgataatttctaaaaaaaattatttaaataattattataattagtaattagtagtgcacaggtaaattctaacttgatacagataaaaaaaaggtaaattccaatttatgtagaaatataaatacattattttagagaacaataatagaaatctgttttttttttttttttggagaagagaagactgagttagaaaacacgctcggtcttcttctccaatggcgatttccgatgagcctgaaagtgtagccactgctctcaaccactcttccctgcgccgccgtccctccgccacctccaccgccggcctcttcaattcgcctgagacaaccaccgacagttccggtgatgacttggccaaggattctggttccgacgactccatcaacagcgacgacgccgccgtcaattcccaacagcaaaacgaaaaacaagacactgatttctccgtcctcaaattcgcctaccgtccttccgtccccgctcaccgcaaagtgaaggaaagtccgctcagctccgacactattttccgtcaggttctcgccgttaacttctactttacgattactacaactctttaactatttcaaactcaaccagaacggtgccgttttgttcccgttctgcataataaacttctcaatctcaatgcaagcgaatcgtagtctttgaggtgcttaaaatagtgtatgctactgctagttagttcttgtttatttaatttatgtgtactagaaactagttatcaatttatgatttgaatttaatacaattgaattggtggatcaggtttttgtagcaattatcgtggtttggtttataaataggtgtgatgagtctgatatgtaattatatttctttactaattattgaatcggttgcagagtcacgcgggcctcttcaacctttgtatagtagtccttgttgctgtgaatagccgactcatcattgagaatttaatgaaggttttgcttcttccatgtttaaattgtacattcacctgcaacaatttttctgttcttttatttatggtcttgattttgacggttcaggttttattgtctgctttaatgagtgttttatttgttctgcagtatggttggttgatcaaatctggcttttggtttagttcaaagtcattgagagactggccccttttcatgtgttggtaatgagtgatgaattcccttgtggattaactgtgtactgtgtaattgttttgacggttgcttcttgaaatgttgtttaacagtatgtggttgtgcgcttggtttgcagtctttctcttgtggtatttcctttcgctgcctttatagtggagaagttggcacaacggaagtgtatacccgaaccagtaagtgaccaggccatgtgagcttttattagatttcattcgttgtataatctaaaatagttttgggatatggttagttgtatgtgctattattaactgtttaatctttaatatttgcatacattggaatattatattacttgaatattgcaggttgttgttgtacttcatataatcattacctcaacttcgcttttctatccagttttagttattctcaggtcagtttagttctttgtatacattcttcaaaatttattctagggctgcagttgatgaccttttcgttttgacatgtgcggttacaccatgtgtccattttgaaagaatttgcttatagaatatggttttaagttgataatggtgttatataacaaactttgtcactatactgcacaggaattttaaaaacttttatcatttattaaaattatttgagaaaaaatttaaagccgttgggtgaaccttagtttaatgtttggttcttatgattttgcaattgaattgttgcaaaatattattgcattgctatatgaacattgagcaatgaagttgaatgctgcgggataaagtaattatacagttgtgcgttcttagtcatttcatagataaggatatcccagaaagatgattactaacttgtagcattcctttgcaggtgtgattctgcttttgtatcaggtgtcacgttaatgctgttttcttgtgttgtatggttaaaattggtgtcttatgcacatacaaactatgatatgagagcacttaccaaattagttgaaaaggtaataaatactctctgtttaaatggagagaaaatgagggggagagaaaattttgaattttttttcttgaagtcaacttttccctcttctctttaactaaacaaaagaaaatgtatgattatgtgttttttctttcatctaattttttccttaaccaaacatattcttaagttccacttgacacttgtaagtggctagataaatatcacaaaatgtcatcttcacttatttgtatactttaaagatgacagtttgttgtacaatgattagtttttgaaccagaacatcctgcttgacttagcagtagcttatggatcatgtactattaaaacttcataatatgctaaagtacagttttatttcatctaaattcgaattacttccatcctatgttcccctttattgcttccttatatctagatgattagctcttcacatgtgtgaatgtgccatagataaaccatctgttttccctccttattcaaacatgtttgctgtgttatagggagaagcactgctcgatactctgaacatggactatccttacaacgtaagcttcaagagcttggcatatttcctggttgcccctacattatgttaccaggtagcagtactttcaagtgatttagttaatttttggaagcaatttctttttatttgtaattgttgtggtgttgcctcatttagattggcctattttacatttgcattcatttttcttgtcttagattgcttataggcacaaccatgtgcagttgcttacccatatatctttggtgtggactatgtctgaggtttttagtcagtgtctaattggacatgctgttgggaacccagaaacagaatacaagaaaagaatgcttcttgtactgaaaaattgaatgacaacaaagaaaagaggagaattttgctcaaagggtttctccacagcagagattctcagtttacaaatgctaacaaatttgaatgacttcccccccccccccccccccaaaaaaaaaggtataattgctctaactaataatcaaactaattgctctaaccatcccaactaatttccccttccctctctcctaactccgtaacagggtgaacataattacactgctaggaattaagttcccatctaaaaggtataattgatccagaatgttgagttggctgtgtgatcacttgattcttacatagtaggatttctccgaatgactttaattattgtctattctattcctttcagcaaatttctccatttatcatcctgtctttcctttccatcttctaattttggccatttgaccttgttcatctcacattcaatactcttttctatttttttggcatgcgcttagacaacacaacattttgtagcataaaatattgtgtaatgaaatctatagcaggaatctcccgaacctttctcatgctccccctttacttccattcatacaaaattcccaatgtacaattcctattgcaatctgctagtttctagacacaacctgctaatcaatgcaagggggaggggagggggggtagtagccactgttagtcaatgtgttcttcaatctgcttataattctgcttgcttcttgcttttatatgattagaagctaagaataagattttaagggaatgggtattacatgactccctggcataaaatgtagcatacatttctaatgctttgtgagaatactggattggctttggcatcttcagtgtttacctaagttgcagaaattttgcttgcggttctttaagtaggtttctgcagttcatttgtctttgccttttcctgcataaatgtatatccatgtagattgcatttgttatttttttcttctgtgagcaaggtttttcacatttttatttgcatctattttgttttatgaactgctcttttagccaagctatcctcgcacaccttatattcgaaagggttggttgtttcgccaacttgtcaagctgataatatttacaggagttatgggatttataatagaacaagtaagcagttcctgttaataaattgtgttcatttctactttttttcctttcttttttttttgtgcatttttttcttcaggtttatttcaccaattctactggtattctgacattattttgattgtaaaattctgcagtatattaatcccatagtacaaaattcacagcatcctctcaagggaaaccttctttacgccaccgagagagttctgaagctttctgttccaaatttatatgtgtggctctgcatgttctattgctttttccacctttggtattccatctcttgtttggttcaacatgtgtgtgtgcatttttcttataagatattagtctgaactatgaagttaatttcacctgccataaattgaatagctgtagttcttgtatcttttgtttaatgccttgacttttgtaccctggcaattttcagatgatgatgatgttataagtttgtaattgattaatctttcaaatcatcgttgaaatgatatccaccttcctaaacaccttaaatagtaattacatcatcaatgggaggatctagctaatttaaaggtgtgcatgtagagactattgttgtctggactctggagtatatacttcttaagatataaaattaactttatagcctgtttggtgtgccacaattgattaatttaagtgacactctgacagatatacgaagggattttagagccttattttattgatggatttgtatatttttcctgtggccagtgaggatattttattcatgtatgcttgatttttctcctctttaatagaactactattagaaaaaactagatctctttgtgcatgcgtaaatgttgatctgattgtctcatttctagatattagaaaatgttcacctttgtttttttaagatttagttcatatttgaggcagcttatcattggagtgactgttccaatgtaggttaaatatcctggcagagcttcttcgatttggtgatcgtgaattctacaaggattggtggaatgccaaaactgtcgaagatgcaagttatttgtcctgatattttgttgtttacttacagtattttcagtctttcataaagagaatttgtgacttattgttttcttgtatttttgctgttgttgctgcttccatcagtattggaggatgtggaatatggtatgtctctttttcagacttaattttgatgaacaaattgattttcttgttgtcagcaaaatgattttctggtttcttgttgggatgaaattcaagtgaacacacacacacacacatatatttgatataactatcccttaagtgtataatgagggttgactactctccgagactattttaacaaaggaagaaagagaagttacaacattttgccatcttactgaataaatggttttaaaactgtctttcagaacatatcattgattattcatcacttaaagttccaaaccattagtataatctgagtggaatcttttacattgcagcctgttcacaaatggatgatccgccacctatattttccatgtttaaggcacggtctaccaaaggtaatcaagcatcctcctgtgttgctgaatggatcctgaatttatttggtctaaactctaaaacatttttaggatttgtcagtctctgtttaccatctcaggttgccactaagatgatcacatttaacatagttaaattaaaaggaacatgtatgttagttatatcctaataatcacagttatgtaaaaacttatcaataaacctattacataagttttttttttttaaaaagtatgtatatattttttttgcactaattgtatggtttgatatgtttgatgcactggaggaatatgtagaaagtttgcaattggtagacaatagttgaacttcatttctgttctgtcgtttcagataaatgactttggaatgtataaacttgactaacacaaacaagaactgcaaacgaactccattatttttttttcttatgtaatcatggttgatatctttgtgatttttttccttggtctttgctatcaacaatttcctatcaacatagttgtttctcattggttaatattttgattggctcttgttttttaaagcattattggtattttaattttcagttctagataatgttttgatttttcatcattgtacaggctgctgctcttttaattgccttcctggtttctgctttattccatgaggtgtgttgttcatctctctgtacagccttctctcttccttttttggtattatgtcattatggttttctgcttgagtatttgtctgcattctacactgatcaatgtcaggaagcatcttgcaatcaatatatttttggaatattctttccttcttttccttgggctgtttggactgtgttaggagttagatagaagggaagggaaaattatttacagacggttagagttgttaattagtcagttacaggatttggttagatataaatagggggtattaagaggaaatgatccattctatttgttatcatttgagaattgagctttgctattttgaaaggaaaaatcctttgtgagggggaaacccttggaggagagttatctttcctattttctgttttagatgataaaagtgttcttttatttctttctttgctttgggttcgtaacagactgtgggagagaactgaaaattagatactaagttgtggctgatttgttaaaaattggtataggacctacgttacttgtctttgaactatctacaacctcatatggcctcagaaaccttagccttaggcagctagttaccaaaatctcaagtaacttgtagcctgtctgtaccttggcatgtgtagatgttacagcttccatatcttaaaatagattgacataacaattatgagggactgtcacattttctagtttccacctgagttcttgcaatattaactttggcaccaaaatttccctacatgtactcaaggatgctttctttagccatgaataatttttttcacatgttgtaattatgttttcaattaatcctgtcatcttttcctcctgaaaaaggtacatacgcagataagaataatttgataacttaattgtcacagacagttgtgcaatttttttcacgatatctctatcatctgagtgcagctgtgcattgctgttccttgccacatattcaagttgtgggctttcggtggaattatgtttcaggtaaaatcaaattaccgtattatacttctgttttcccatcttctattattaaactaaagtattttaatttagagcaagagtaacacaaattttccaagaaaccaaacttctcccctcttccctcacgaagaaggtgaaggattgcccagattttgtcttttcctgttcttttatggccaaatgaaagaaagtattctctgaagtaatgaatctgtgccatgtttgaagtagttgatgattatgatatcatccatacttttggttcaattgacatgatcatgaatgcccggtttttaggttcctttggtcttgatcactaattatctgcaaaataaattcagaaactcaatggtacgtctgctatttaagtatatcagttcataaatcataatgtatcttataactcccatcatcttgaatttgattcgttggttttttaatgttattttcttcatgccaggttggaaatatgattttttggttcatattcagtatccttggtcaacctatgtgtgtactgctatactaccatgacttgatgaataggaaaggcaaacttgactgaagctacggccattacattttaaaggtgcacatggatgagcttttcagttttcagattgtaaaattgatgtggatatgttggtcaatatttgttttctacgaatgctttcatctaccatggcattggctgctctgaaggaattccacgggatatgccagttcacgaggctaattcattatcttgatctatgtacttaccaactctcctctggcaattgtatcaaaatatgcaattttgagagccatacactggcattgataactgccaaggaacactctaactgttttctgttaactgttaattagtagagggctagatgtaaatggtttatgctcaatatatttatttcctcctagtcttcaagttccacggatgaatgatgtctttatagcagtttttttcttctacaaaacttgcatatcactttaaaggtattgtttgtgttgtttttgctgatcataattgaagtttcactttgataatctgcatgatcaacgttaacattaaaaaatatatatataaatcatcgaaataaaactataattctggttaaagaacagtacaaacaacacttaaagaattgtgtacaagtttttccctaaacacttcatgaaggttacttggaatgttcagaagagtggctttgcgtctggcagaaaactttagtaactgcaagtgctcggtccaattttcgttgacgaaaaattaatggttttatgcttgatctaaatttctcaatcgagaaggcgtattatcattttcgtcgtttaaaatttatatcttgttattgatcagtttaattattggttagatatttataatattgttactgattaatgatatttttaacaaaaaagtttagttatagtataactaattaataattaactcttgaatagttacattagataaaacgaggggtttgtgtgaaacacacaaacgtgtttagtgaaaactctttactggagaaaactaaaaaaagtgaggtttgaatgccagattaagtggcaataaatcactgtagagcaggagcacatgatccaattcggaccacccaaatccaattaacaaatttcaatgacggcgtggttgtcacgtgacacttacacatggcacgtttcaattggcaccttgatccacgctctaacaaaacaaaaaccctttaatttttttagaagagtaatgctagctgaattctcaatcaaagactttttataatttaataaaaatcattaattttatcatattttatatcttattttagaaaaaaattattaaataaataacaaaatctaaaaaaatgatgattccaataaatttataaaaaaaagtataactaatatttctcttttcatagataaatttagca

SEQ ID NO: 393 - DNA, 2903 bp, Glycine max
  source 1..2903: mol_type = genomic DNA
tattaatttatttttatgtattttttttatttaaaataattttgaatttcaaaagaaatttctagaaatattaaaatgtaaacttgtttaaaatacccaagaatgatattttgatgtactatatccctatgaataaaataaataggtcaacagtaatatattttaaaaatactatgaagattaacaatatattaatatgccatatatcataaaattttattgaaatacataaaattgagttatttataatatttttttacgttcttctataatttttataataaataatttattttttatttttttaactagtgtcctaggacatttattagtaatacccatatattatttaataatcgtaaatattagagtttaaggttggggttcatcattttgacaatttattcttctatttctcatgttacatcataccatgcatgtcttcatgttaatacttctatcagtgtcatcatgttaacataaattgttaaattgaaactcaacaaaacaaaatggtacaattaccatacatatcagatagaaatactacatagtactgtcaaaaaaagaagaaagaaatacacttaagcctaatttgtacataataaatactgtcatagattcaatatttatttgaactagtgtttaattaaattactcaaatagtagtatttaattgggatattgaataagttgaagatgacagaggtggtagtactagtactagtaaggagttatagtaagtaaaggatattttggtgatatttaaataagtccatgggttcggctgtgaaagtagttacggctatgttaaagggatcgttgggtcaattcacttccctcccaaacccgaaaacataataacattagacgatagagagaagaagtacgttgttgcagggcagggatatttgtttctcactctctctcatgttcactcaacaacaacgacgcactcactgacatcaacactagtttcaggtgctatctcatccaccaaatgcagcaaatacactccatgcccggagggaggtttttctccggctccggatccgccgaccggaggctccgaccccaccatcagaaccagcaggccttaaagtgcccccgctgcgactctctcaacaccaagttctgctactacaacaactacaacctctcccagccccgccacttctgcaagaactgccgccgctattggactaaaggcggcgtcctccgcaacgtccccgtcggcggcggttgccgcaaatccaaacgctcctccaagcccaacaaaataacaccctctgaaaccgcttcaccgccaccacccccgcaccccgaccacaacaacaactccaactctcattccagcagcgagagctccagcctcaccgccgccgctgccaccaccaccgaggccgtgtcggcgccggagactttaaactctgattccaacaacaacaacaacatgcaagagtcaaagttgttgatccctgctctggaaactaataattctctggagcagggaacaggggactgcggtggtatcttctctgaaattggtcctttcaccagtttgatcactactactacttccactaatgaacctttagggtcagggttcgggttcggtaactccactctccccgatgcgtcgtcgtttcagtggcactaccagaaggttagcagtaacaacgaagaattgaagttgccggagaactcctttctcgatcacaccgttgatttgtcggggatgcatagtaaaaccagccacgggggaggattcggatcgttggattggcagggcggtgcagatcaaggtttgtttgatcttcctaacaccgttgatcacgcttactggagtcacactcactggtctgaccacgacaattcttcttctctctttcatcttccctgaaaatgttttcacgcctcttctaaatcttatctcacctttttttttatttcttatataaatttaactttaaaagaagaagagtaaaggagattggaaatcaaaaccaaagttttaaaaaaatttgaaagagaagtggaaggacttggtataattaattacgcggtgtatatttttttttgaagttataaatttggggggtgattgagcttgatattaattagtgatgtgcatgcacaactaacttccatgttagtttctacagtatctgatttctttctctcttttttgttttctgagttcaggttttaatatatatgtatgtggaatttgattgattaacagagaaattatagcagggtgttttaattttgtcatccacccgtcgtccttgtttatttagtagttggttgtttaggtttgtaaattgtaatcggatttttatgtttgttgtgtgacgctaatccttccgtaccattactcaacagcatgactatggcaacactacctatttaatattattatatgataacatgttaataatgaattaagaaatgagaggatgaggtagggagaagacattgtattggttgtatgttaaattctaattctaattctaatctaactcccttgttttttggttttcaattctattgtgaaattgatgggagtctggtatgtggggatttcattagtgagattaagataagtgcagaaaatgaaagtaagaaaatttgggattgggagggataggagtaggttggggcgtggggtagtgatgagttgcatgcgcgatggatcatgattcttgagtccgcgtgcgggagaggaagggttatgaatgccaaaaaagtggggacaggttggtttgggtggcaagacaagaatgtgatgtgaggagttggttgggttgggttgtcttgtggtggatcatatttgttctgtatgctatggactaaacataaattttcacccatgagtctcgaacacaattcctaagaga

SEQ ID NO: 394 - DNA, 3268 bp, Glycine max
  source 1..3268: mol_type = genomic DNA
nnnnnnnnnnnnnnnnnnnnnnnnnnnnnnnnnnnnnnnnnnnnnnnnnnnnnnnnnnnnnnnnnnnnnnnnnnnnnnnnnnnnnnnnnnnnnnnnnnnnnnnnnnnnnnnnnnnnnnnnnnnnnnnnnnnnnnnnnnnnnnnnnnnnnnnnnnnnnnnnnnnnnnnnnnnnnnnnnnnnnnnnnnnnnnnnnnnnnnnnnnnnnnnnnnnnnnnnnnnnnnnnnnnnnnnnnnnnnnnnnnnnnnnnnnnnnnnnnnnnnnnnnnnnnnnnnnnnnnnnnnnnncagtgaagtgtaacttaatcccgtggtgaaagaaatatatatatatatatatatatatatatatatatatatatatatatatatatataaattagtaaattgcataaataatattagatgatactttttaacaaaaaaatcacactttaaatttcttaaccattatataagaataattagtgcttagcaaaattatttttatttaattagttacttcaacttataggaatttagtttagttcaagtaagtgttgtaaatttttaatatggtgtttaattctttgggataaaattttttcatcccatcattccaaactcttgtcaaactgatttagctgtgcataattattcctgacacgatctagtacttaatgaacaacgtactaacatagtagcattctaagatcttttttacattaacatcttggtacttgatttttttccttagatattcgtgtgcatctaacaccgacaaatttgtcatggacaaaaattcacgccaactaacacgtacaagccaactaccaagcaagcacgttagactaaaacaccatgtgttcaactaccactctctatttcgctttcactccccattcttcttcaattgtatttgtaataatacccttccactcccctagtcctaggaattaacttgctcctattaatacctctaaatcatttccttattctacacacacttctttatctgcatctaattcaatatacaacactgaaactttcaaagctcttttgagaacttgttattgcaatggctgacatagatcgctcctttgataataatgtttctgctgtttctactggtacccttttagaatccatgtcctcaacaatcaattctgatagctagataagaatatatcttgagattagtttttgatgggtctataatattataatataacatgcacctacaaacttgagagtacacactcatgattgatctctcttcagttttatttcaactattgttctgggtcacttcttggtctttttttatgccattacacttgtcaaatttggaatatatactttctgaatcttattcttatggccctttttatttcttgttcgatcgggatatcaccttgttatcatgatttctgaaattgtatatgcaagctttcctttctcttacgagttatattaaatattttggttttgattttcttaatgtgtgctcatggatatactttaagaagtcaaaaattgaaccaaaaaaattattgaaaataaattaatatattgaaagcacagaagttatatattcatttcattttttagtaatttaaactatttaacaagatatgacatatatctgtttatgcatcacaaaatttgttgtttttaacatagacgtataaagaattgatttgtgttttgtagagaaatcaagccaagtttcagatgttgaattttctgaagctgaggaaatccttattgccatggtgtataatctggttggggagaggtgagtatgatatgttttgttctaccattttcactttcttcccaaagtctctctctctcttttaaccatttgaagataaaggttatgaagtaataaatgttatgttctcccttaggtggtctttgattgctggaagaattcctggaagaactgcagaagagatagagaaatattggacttcaagattttcgactagccaatgatcggtggcagaaaacgaagcaaggaaatttttggtgcctacaagtcattacagtgactttgtggggatatgaaatggaaattgatcctattaatcatatgggtacttatatttgcattttgcggtaaccaacaaaaaggggcatgccattctaaaagcccttatgtttaatgttacttaattttatctttgtaatgttcccaagtgttttaggcaatctatgattcagatctgttcgatcatggcaagaacagtatgtacttaattaatgcagatcacctgcatgtgcatgtgtatttctggttcatttagccttcttgctaatggttacaactagctttgccttggcctatagcattggatttggaagcggattttttctttgcatgtatacacatacattaagtgtattcgtaaggcatctttattttttgtgtaggtttaatttcttttatttgatatatgcaacatacaattacttttttttataagacaaagatggtggagtaaaatgttacactagtacttgtgacttgtccattacaagaaatatcataacaagagaagcttactagtggggatagatcactactcataaaatgacaggtatttttcatccttgctttaattaatttataatgagcttttcacctttatcatttttaccacctcatttgagtttacatgagaagaattaaaacgcacggcttggtttctatgtatatctatattgaccatattaagttcatctaaataagttttgaaaactcgaactcattcctcttattttgtcatccttaaatgtgataaaaaaaaaaagagttttacccaaaaatggtagtcgccagtgggtttatgcgcatctagccacaattagctaggcaatttgcatttttgtcaaatatactacatgaaacagtattacaggagaaaaataaatgaactattgatggaatctatgttacatttgcaaaaagacacacaatggttaatctctttagtctatatattacacctcttcttagtagatggatggtattaattaattattacctttcttgcaaatgccttgatttttttagagtaaatactacactagagattattgtactagtatagttttctatctagatgatggcaatgactatgatcgaatcaccctgttggctaatttcattgaatacttgcatgtgggtttcaccttccatgtccatagatatctaacattacaatattgataagactaaatgagttattagcttatatttgagttgatttcaaagttggacatt

SEQ ID NO: 395 - DNA, 3843 bp, Glycine max
  source 1..3843: mol_type = genomic DNA
tttaatattttggatgaaaataattttatttaacttttaattgaattttagattagttaagatttttttcttgatatattgaaagattaagaaaaaatactttatttacatgtataagcttaagattaaaaccctaattatatataagatagaattatctgttaactattatattataccatatcagttgtcacaacatgtgtttctggggttattgcctcttgagttcaattgcaacttgttaagcaaatcagccggcttaagacctaagcaacacaagcaagggctttaggtttcaaaaaaaggtttcaatttttttttaatattaatatatctaaaaaaattattgtaaaattatatttgaaaataagttttaattaaaatattataactaaccgttaatctttttattggtactataaataataatcaatgagcaacaattcttcaccgacatcatatctttgttttaaaaaaataataattttaataaattatttgataaataaataaaagattttattcttaaatttattttaaatctctttgtgtccttgaaaagtccatgatacaggatgagatatttgactatttgactagaaacgtagtaggtgatatatggacatttcctggtttattttatattcttaaaaaataacaattcaatcgaatgtagttgccaaattttaataaataaataaaaagaagcattcatcgaattcttcgtcttttatgagtgtaaaacaaaacattgaattaggaacaattattatcacgttacttaaaataaaatatactaaaaccgttgaatgaaatcttcatatttgataagtgtaggtagacccacaacacaaacattgaatttgaataaatttccccgtacagtgtcgtccactatgtggctataaaatggaagcattgaaggttgtttcctcaggccaagatcttggatagtaattaacctcactcaaactcgggatcacagaaaccaacaacagttcttgcactgaggtttcacgatgttgctggaacttgcacttggtttgtttgtgttagctttgtttctgcacttgcgtcccacaccaagtgcaaaatcaaaagcacttcgccacctcccaaaccctccaagcccaaagcctcgtcttcccttcattggccaccttcacctcttaaaagataaacttctccactatgcactcatcgatctctccaaaaagcatggccccttattctctctctccttcggctccatgccaaccgtcgttgcctccacccctgagttgttcaagctcttcctccaaacccacgaggcaacttccttcaacacaaggttccaaacctctgccataagacgcctcacttacgacaactctgtggccatggttccattcggaccttactggaagttcgtgaggaagctcatcatgaacgaccttctcaacgccaccaccgtcaacaagctcaggcctttgaggacccaacagatccgcaagttccttagggttatggcccaaagcgcagaggcccagaagccccttgacgtcaccgaggagcttctcaaatggaccaacagcaccatctccatgatgatgctcggcgaggctgaggagatcagagacatcgctcgcgaggttcttaagatcttcggcgaatacagcctcactgacttcatctggcctttgaagtatctcaaggttggaaagtatgagaagaggattgatgacatcttgaacaagttcgaccctgtcgttgaaagggtcatcaagaagcgccgtgagatcgtcagaaggagaaagaacggagaagttgttgagggcgaggccagcggcgtcttcctcgacactttgcttgaattcgctgaggacgagaccatggagatcaaaattaccaaggagcaaatcaagggccttgttgtcgtaagtttccttcttctctcctactttattactttctttcattcatcatatgtattggcattaaatagtatactatatgagaaaatatgttacgcactcacggtgtaaagatatgtggtgtttttttaaaaagagatacagaagttgcttttatgcatgtatgttaacgtatatttactcaagtggaaactaattaattctcaattttgggtatgtaggactttttctctgcagggacagattccacagcggtggcaacagagtgggcattggcagagctcatcaacaatcccagggtgttgcaaaaggctcgtgaggaggtctacagtgttgtgggcaaagatagactcgttgacgaagttgacactcaaaaccttccttacattagggccattgtgaaggagacattccgaatgcacccaccactcccagtggtcaaaagaaagtgcacagaagagtgtgagattaatgggtatgtgatcccagagggagcattggttcttttcaatgtttggcaagtaggaagggaccccaaatactgggacagaccatcagaattccgtcccgagaggttcttagaaactggtgctgaaggggaagcagggcctcttgatcttaggggccagcatttccaactcctcccatttgggtctgggaggagaatgtgccctggtgtcaatttggctacttcaggaatggcaacacttcttgcatctcttatccaatgctttgacctgcaagtgctgggccctcaaggacaaatattgaaaggtgatgatgccaaagttagcatggaagagagagctggcctcacagttccaagggcacatagtctcgtttgtgttccacttgcaaggatcggcgttgcatctaaactcctttcttaattaagataatcatcatatacaatagtagtgtcttgccatcgcagttgctttttatgtattcataatcatcatttcaataaggtgtgactggtacttaatcaagtaattaaggttacatacatgcacatgtatcatctcccatttgtctttgtttcgtacgtaagacaatttttttttcccggccaaactcataatcataagagataaatcatctcataaactcataaaaattaactagttaacttgatatatatataaaacacaaaacaagtgtgtaatttacaaagatactaaatcagttcaaaaaccattctgtttgggaggtcatagctctatgatatgtaaatatcaccaaggtcattgtaaattggttaattagatgataaaagctgcagcgttgttatgagtctttaggagttgtcacctattttctctctttagtgaatttgcaaattgcgatggatggtccatgatccacgtattttgccatagtattaatataaagatacccgttaatattttaaaatcacgtatgtatgtgattaaaagtcaattaacgattcagcaacataaagtaattaacttttaaaaaattaataaaatggataatttttttttaaaaaaaatacgtaaataagtcagtcatatttgaaaaacacaatattttgggacggggacggaaggagtacaagatattatttacattagttggttttgaagaggtttgtgggatttcttggtttggtgaaacagaggataagtgaaggttcaaataagagttccatataaaagatcattgcacaaaatcaaactacaaacagttccacttaattatatttacttaattaatctttagatgtcaaagaatatccatcagaagggttttatcggaaaaactgaaatttatattcatgagaaagatgaaagttggttcggaatctttgatcgcttgtgttaaccaacgaggacattttgcttggtactcccatgccttcataattcaattttatttaacgttttactatttaattaaatgttgt

SEQ ID NO: 396 - DNA, 4145 bp, Glycine max
  source 1..4145: mol_type = genomic DNA
catatacacaaaattatctttaaattaatataaaaatattaataacatatatttcataaaatatcaaaatttatatccctgaaaaaaattgtagtgatgttttcttttagagaaaaaatgattatgaacactgcactatcatatcataatccactgttaacttttaaaattatcttaaaataattttgtttataaatgacaatataaaattatttaactatattaaactctttatatatatatatatatatatatatatatatatatatatatatatatatatatatatatatatatattagtttatatgtcaaaacaaaatttcatctaaattttaaaattcttatataatggtttaaaaacttagtatattaatataatatagaataaaacattttagttaatatccataaaatacccattacacttactaataaatacgtacaccaagaataataatagaaaacattgttactcttcaatagattaatttatttattttttttcttgttaaccaacaagtatcaccattcactttaaagaatacgaagacgaagaaaactgcgctggcaaattcaaagacgcccacaaagcggaaaaagatccacagaaatcacgattcactcgtctctacttattctacgtaccaaaaccacagcaccccctgttttacaaaatcccccattatttatttcacctgcagcctggaacttttgtcatcccatgccacgtagcttttcttcaatgaccatagtacccttccttacgccgctagcactacccctaaaaactgcaatattttcttaactgaaagcatccaactatctaaacacacattttcgcaggtatcgggccaaatttccacataaattcgcataaacttcaaccatccaacaactaatttggtaaatattactacataacttaaatacccaacatggcatttccgtaaattatcaacaaaccaagggctaatcactagtcacaccctttacaaatatctccaacctctccacagttccactcaaacaacactagtcaagtacaatagacacgtaatcaaaaccatgcagatacgaacctgccactccatcaccacccaaacccttccacaacttccgtgttcttctagaaaagcccaccaccgccaccttcttccgccgttaaacgctgcggtttccgcgcgccgttcaaagcccggaaggcccactcaatgcctccagaaaagaaagaaattttcaagtccttggagggatgggcctcggagtgggtcctaccgctgctgaagcccgtggagcaatgctggcagccacaaaacttcctccctgacccctcccttccgcatgaagagttcagccatcaggtgaaggagcttcgcgaacgcactaaagagttacctgatgagtactttgtggtgctggtgggtgatatggtcaccgaggacgcgcttcccacttaccagaccatgatcaacaaccttgatggagtgaaagatgacagcggcacgagcccgagcccgtgggccgtgtggacccgggcctggaccgccgaggaaaacagacacggggatctgctcagaacttatttgtatctctctgggagggttgacatggctaaggtcgaaaagaccgtacattacctcatttcagctggcatggtaagtgtttcactgttttttattttttatttataatttgaattcggttgactagattctattgattgggtgagtatgcatttcttttttacttgacatatggcaggagtaatttcttttgtatatacgtgtttaaaattggatattgttcgtctagcgatttttgcttctcttcattttaatttctgaaggtttcgagatgtaccattccacatgaagcaaaaattaattgaaatttataatttaaaagaggtgatattctatgtactattaaattgaacaaaattgttattcataacaatatataaaagaaaatatttccttttttgatctctacatttgtcgattattttgtcttttaattgtttttaaaactactcactactatattctcttccattttttatttaacatctactctctattcttctttcatttttttttgttttataaaaagtacagagactcttcaattttctatttaacgtttactctttatttctctttctttttatattttaacaagaaaaatagagttctgtatctctctttaatttatatataagctctgtagcatgccggtccacatcacatataatagtttaaaattaaaattaattaatgtacttaacagctgcatagctcatattggtatattaaattgtacaagaaaaactgaaaagccaaacaaacatttttagtatcaataaattcttggtttcacgtgacatggcaatcggagctttctcatagcaagttgggcagacttaaattgaacagttaagtagattttttctttttaaaatgaaattgaaatattgtattttgttttgattaaattgggtaggaccctgggacagacaacaacccatatttggggtttgtgtacacgtcattccaagagcgagcaacatttgtggcgcacgggaacacggctcggctcgcgaaggagggcggggatccagtgctggcgcgcctatgcgggaccatcgcagcggacgagaagcggcacgagaacgcgtactcaagaatcgtggagaagcttctggaagtggaccccaccggggcaatggtggccatagggaacatgatggagaagaagatcacgatgccggcgcaccttatgtacgatggggatgaccccaggctattcgagcactactccgctgtggcgcagcgcataggcgtgtacaccgccaacgactacgcagacatcttggagtttctcgttgaacggtggagattggagaagcttgaaggattgatggctgaggggaagcgggcgcaggatttcgtgtgtgggttggcgccgaggattaggaggttgcaagagcgcgctgatgagcgagcgcgtaagatgaagaagcatcatggcgttaagttcagttggattttcaataaagaattgcttttgtgaaatttcagttaagacttaagagataagagatagaggtcaacgtgagtcaacaggtttttggctttgtgactattttgagtttttgtttgtaggtggcattttgagtacgaataatgaacaatttaacatggattgcgtgtaatggacattgttggatccatggttgttgttctggtggatacaaaaccagtaggacttttttgttgtaacgtttggcttgcatattagcttagcttgttagtgtttctctttatttaaaatatcatattttgtaataaaatctctgtattaggtaatgatatgatatactaatagcatgttttggttttgacaattgagagaatatgtctttccttttgaaagctacttcatctaaagcatagcattaaaattgagatctcactttgtacgtggttgagatctcaattattcaatgcaacattataagtattactatctccaatcaataaatgtaatgagtcttttcgattctgttaattgcgataaaaaaaatagtgactattaattacatagattattttctatgtgagtttaatttttatatattgtgagtgtgaaaatttttatacttttaatcaataaaaaattatgataagatggactttaaataattatggcaaaatgttaataaatttatcatggatattaatttattattgggtaaccgtataaaaactagtgctttgagtcattggatattttttctataaaaaatcaaactaactcaagtaacctttcgatttattaatgatacttgcgacaatctctctgagtgttcgaacaaaagagaaaaggtacaaatgaaatgtgaataataataataaataaataaataatgaagcctacgtaatctatatggcgtttagagttgaacataaaattcaaatttagaattaaaatttgaataatcaaatcaatttttttatataaaaattattttaaaatttaaacaattttacatgataatttcatcagattagacaataacagctcaaagtatatctagtaacactttcgattttaataaaagaactaatataaaaactttga

SEQ ID NO: 397 - skipped

SEQ ID NO: 398 - DNA, 7635 bp, Glycine max
  source 1..7635: mol_type = genomic DNA
aacatgatcataacagaaacaattgtcccaacatatctccatcttaaattttttctttgtcaagtataattgtttaagtattttattgatgatacaatatgatgttcttctgtaaataagttgttaaacaaaaagtcctctcatttttaatcaaatctaatgacataaacaaattaattatatttagtaatataattatattgaaaataattatattagaaaattcagattttaaataaaaatattcatctaaaaaatatgctaagtaaattaaataataaaacaaaaataattatatttaataatatcattttctttaaaaaaattaaatttttttataaaatttaatctaataaataagtaattttaaaaccaattaaaaaaattatatattataatattttaaattaaaataaaacaaaaaagaaaaaaaaagccctaaatagtgtatattgagaattaaattgcaaagtagtataaattaagaaaaaaaagatgtatttactgaaaaaaacagtatctagatgtaatcatattttacttgattatatctccatgaatcttggagataaaatataattatatcttatcatagttagaaaatattataatatgctttggagtatgaaatttctaactgaagaatcctatttcgaaatgactaaaaatgaaagtcacctaagaaagaaaaaaatgttttaataaattttaactaaaatagaaaacgtgttaaaatgtatcactataatttttaacaaattttaactaaagtagaaaaatgtgtgagagctctagtgaagtagtaattgatgcatataatgtggtaattaccttgaagtgaatagtagaggttgaaaaaggggagttacgtgaggagaattgcagctgcaaaacatggaaatggaaaagcaaaagcaatactaaacacttataagggagggtgtgtgagggtcccaccacaatgcaacatcactcgtgcatgtcacgggctcgttggtgagccgccaccacacttccaccacaaattcatattattccctgtgcttcattcagtcccttgagattgggaagcattggtggctagctaagcgaagctaaaaccaaactcttcagcagtttgtttttgcttagcttcttcttctgcttttgctttctccaccaccacaaccaccatgtattctgccactgcctccaacactttcttccttctctcttgtttccttctcttctgtctcctctcagctccttcctgtgtttccatgttctctggtaattgtttttctctcttcttttttattgcttttttggtttttcttttttctctttcattgttgtctgtctcagaaacataaaagaaaagcaaaggtttttgagtttttgggtggcgtgcaaagacacccttttaaagattcagattccgttttcatgatgttagcacaagatctcctttttttcttctctctctcagatttcgatgcaacagcacctcaactgaacccagaaaaggcacacttaaccgaacaaaacgccatctcagcgtggtgacggttgagattctcccgtttctggcgtcaccttgaatctctccgagtcaccaaacgcaaaaaaaaaaaaaaagtttttttttttataaaatattcatgtgggtccttggattgtgattcttcctttgaccctctctcggggtgtgcctttctgggcttgtggatgagttgacacctgattcaaatgagattgtgttttgcgtgaggacagagaagaaagagagatcagaaaaaaattgtgcttttgtgtgattcttatatatctagtggtgctaatgggtcaattcatgacacttgttagttcactggagatgcttgtttgacaagatgattaataataataatttaatactctgactgggacatctgagttttttggaatgggtagggtggtggtaggagggtatatatgctactgctttatgaggaccagattttgaaattaaattagttagcaaaagggaaagaggatgatgtaagtaagtatattgtttttgatggtgacaattgttttttttttcttcttctaaattgtgtgtatggcttgattaaagttagaaataaaggggggaaagaaaacgggaagaacaagttagctttgtttgttcttgttgatggatgtgattgattgcgtgaatgtgctaagtacctatttgaaatgaaatgattaggtattgagacaggagatttagaaaaaagagatgatttgtttccacagattctaagagacgaggcagttgcaaggctttatgagcttgggaaggtaccaaatctaaactcagctttactttgtctgataattttcatttatatttctaatttatagtcaaaatagtgcatatgaatttctgttcttgacctcaatgatccagacccttacaggaaaatgctgataacttcaatgtctgccagttttaaagcataacattgaaagaatatgcaacattctgtaatctaaattgtttattttattgcatacactgtgctgattattctcattcagtggctggtggaccatgaattgtttattcttcttggaagttaatgttgctttttggatatacaggtgagtgatgctagtggttatttggagaggacattcttgagtcctgcatccatgaaggcaattgatcttattcgtaaatggatggaggatgctggtttgagaacgttagccttctaacttgttcaactctgaataatttttctgaagaattgactgatgcttttgttatttccagttgggtggaccaaatgggaaatgtacatggtcgagttgatggtgcaaatgaaaatgctgaagctttattgattggatctcacatggtgaggcatttattcctgcaatttattttaaacaaaattgatactttccttgacagtagtgataatccattttaatgatggatactaggacactgttgttgatgctgggatgtttgatggatcactaggaattgtctctgcaatatctgccgtgaaggctatgcatgtcaatggaaagctgcaaaagctaaagcgccccgttgaggttagtcaagtaactgatacaagtttgcaataaaagtactggtttgtgctcattgctcattgatttattgtatccttttgtaataatgttgtgcattgagagaaatatgtatatggaaatgttgaacctatgctactgttttattgatgacattttatctttctaatgctgcaggtgattgcatttagtgatgaagagggtgtcagatttcaaactactttcttgggaagtggtgctatagctggtattttacctggtacaacattggagatatctgataagaggtttcacctaggaactttctggttacatttatgggaaaattttgtatgatcaatatatttattcatagacctctttcagggaggtgatgattaaagattttctcaaggagaactcaatggacattacagaagaaagtcttttaaagctcaagtatgacccaaagtctgtttggggttatgttgaggtataataaaaatttgcattcttcatctagtgctgttttgctcaacaatttcaccaataagctcatgaaaatttgcttgtgtgtttattacgtgctgcaggttcacattgagcagggtcctgtgctagaacaagttggtttcccacttggtgtggttaaaggcatagctgggcagacacgattgaaggtatacaaataagttttgctaatatgatgtgttctaatgctcacagttgctcggatcagttatggttgttccctatgatggaacaacaagatataactgactattcaaatggtcttgcaaccaaacaaggctttttaatcttttcatgcatgacatatgatgtgaacttgtcaccaaaggatctgactcctttaaagtaactcactttagagggtaaagtaagttgtctcagttgtaaatgagaaaatcaatggtcgatattatatgcacatgcataacaaattacgaatgtgttggaatatcaactattgatttttttgtcaacaactaagattattactttaatccttactcatttttcaggagccaaatccgtcgtcaccaaactaccttttgttatttggtaaaattttcaacatcaatgtttgtaaaagacatttgtaataaaatagatctatctacacactgttcttggttggttttctagtatttcttgctatatgtatatgtgctctttgcatgtgtatgtgttggtttgcaattcacacataaacaaccatgcaggttacagttagaggttcacaaggtcatgctggaactgttccaatgtccatgcgccaggatcctatggctgctgctgcggaacaaattgtagtcttggaaagcctctgtaaacaccctgaagaatatctttcttatgatggtcattgcagtgattcaacagtgaaatcactgtcaagctcacttgtttgtactgttggggagatatcaacatggccaagtgccagtaatgtcattccaggccaggcaagcaatgaatttctaaaatgctactgaccctgcaatctcaaagtggccatgcttcatcatttcttatttttgatagtttatgcccatgatgacagtgtgtgccttgacttgttgtaggttacatataccgtggatatacgagcgatagatgaccttggacgtgaagctgttatctatgatttatcgaaacaaatttaccaaatatgtgacaagcgttcagtttcctgcattattgagcacaaggtattatggttggccttcttttagttttttcagttgttttctgaattgtacttacaatcaatgactttgttctgttcacctcagcatgatgcaggtgctgtgatttgtgattcggatctaagttcacagctcaagtcagcagcttattctgcactcaagaagatggagggtgacattcaggatgaagtgccaacattaatgagcggagcagggcatgatgcaatggcaatatctcacttaacaaaggtaacatatctttgttttctgtttgtagtttttgagatgtaatttactctgcagaatctgacaatgaatgaggatttgaacaggtgggaatgctgtttgtgcgttgtcgcggaggcataagtcactctccacaagagcatgtgctagataatgatgtctgggcagctggtttagcaaccttgtcatttctggaaaacctatcataagtgatacggtaactgtgtaaagcaataaatagatattatagcttgtaattataggttaatttattgagttaattcatgagttaactcttttcttttagttgcttgtgtcttatagttttgtaattgaatttttggttttagttatcctgttatcaggaaacggctccaagttgttatgcatgttctttgccagtgtcagattaaaacttatgactgattttatttttgaatttaataggtatatactatttagtgtaaatgtcatcaagtcattttaggacagtagaaatcaatcttggtatgacttgtaaggtagttagtataaaagtaaataaacttgttatgcataacggtttatgattaaattacaatttaaaatatgatgcatgcatgcagtatttattcccacacaaatgcttagctctctgtattggaagttgaaaaaagttacctaatacatgttgctttacgaattcaaatttgtttgtcaaatcattaagaaaatctctttttggacaatgttttcttaattgttaattcatttttgtgattgattctttaattggaatgacatgaaaagtgacaagaagaaaggacaccatattggattccatactttcacgaacattgagtattttatagggagagtattggtacgtagagttgcaatgcatgggacgcgtaaacttaataataattagaaaatgattgttcttcccactttgactctggaatcctagctctaaaacttaataaaaaattcttgccgaataattttatttggtacaaaaataatttccaccattgtattatgtccaatcaggtgttagatgattcaacataaagaaagaaaggaatatgacttgatattggtggtcaaagtatcaaatgcaaccgtcaaaataaagaagggaacatgaatgcaatcatattcggattcacatagccaaagcctaaaagtaattcgtataaactttggatatcctctcatgttgtttaggagcatgatacaattatgttcaagagagaaagaaatctttattaaataagaacgcactatggttgattgtaagactcattaactatttgtcatcatgttagttcaaatccattcgactttcaacattattgattgttgccatggagagatattgttaacttgcaaactggaataggtgagtgaggctgaggtagaagattgcattcatggactgcacaagtgtacgagaaccgaagcctattttgtctggtcaattcgatttgagaggtggattaaatagatgcatgaaagacgaaggagttggttgagtggaggaagacaaaatctctatctaattagtcgtaggtttgaacttacactcttctctttgaagtaaaatatatgttagttcttaaaatatacactttttttgagtttgaaggttttttctgtcttaaataaaaagatgattgcatgagtgaagtaagatagaatctacatcttgtaggttcgaaccgacacttgtttctttgaagtaagataaatgttaattcttcttaaaatgctttttgggtttgaaggattttccatcttaaacaaagagatgattgaatgaaatgattcatggcaagcatggagcatggcacattggtcttgtcaatgcttttatcaaccttattaaatttaagaaattcaataacaatatattggttataatatatatatatatatattaacagtatgttaataacaatccttttacactcaatgatagtcaaagttaacaatatatgtcatctcatatacctttagtttctgcagcacaagaactttttgatttggagatgctatatgacttgacatcatcgggtgaaaagagaagcgtgggtaaattaagaaaaaaaatctgcttataatgtccaagaaaaggataactgtaatcacaacataataaagaaaaagaataccacttcaattgtttataggattcatatcctaattcataaaggattcatttcctgatgcaaataaaagtcactcatttaattcaaaattcaattaaagagattgataatttaattgaagaatttaagttcttttcattcaagggattaaagtttgaatatttttatgatttgataataataattgaattttgaattaaatgagtgacctttgtttatacaatgagatgatttaatgaaatcaatctcaaagaaacaataaattgttgcactttccacgactgaagcatgatatatattgcagcaactaattgtgtcacataaaattgagaagaattttagaagtgatataagtagaataatcccacaaaaatattttgtgacaacaagccagtcattgcattgagtaaaaattcaatttttcatgggtgattcaagcataatgatattcaatt

SEQ ID NO: 399 - skipped

SEQ ID NO: 400 - DNA, 4560 bp, Glycine max; identical to SEQ ID NO: 333
  source 1..4560: mol_type = genomic DNA

SEQ ID NO: 401 - DNA, 5902 bp, Glycine max
  source 1..5902: mol_type = genomic DNA
acatataaggctgcattcatcaataaaaaataaaataaaaaatttcgtcactaagaatcccaatgttcatataataatatggaatgtcatattctttacactcttataaacttcaaaacaagggaaatgactatatattaatttataatctcaattaatctgtatataatcaaattttgtaatatctaaaaggtaattaataaaactcgcccataaattagtaattaagatacatgatataatctggatcatatagtagtacatctgagttctgacttgggaccatctgcaaaagagtgcgtgtaagtttgtgtttttcctctcattttttattattggttaaattagtcgttttgtcgttatagttttagggttcttatttttttttgtttttttattggtcttttttttataatttatattttaattttttttagttcttctagtttaaaaatattttttttaatccctgtaatttatattttaattctcttttaatcgtaatttaaaaattataaaaataaagtaaaaattatgaaattataaagactaaaaaaattattttcatgattataagaattaaaaaaaattaaaatataaattataaagattaaaaataccatttttaaattataaagattaaaaaaataagaatcataagactacaggtaattgaataatactaataatagttaagctccactctcatatcccataggcataactgattatatacagtaattatcattatagttaattgaataatactaataatagttattagtattaatttgttaatgatacgctcacaactctgggtgaaagacgtagtacgtcacaaacacacaaactcaccactcaaaccacaagcttcacctaacccctattcgaactaccatcataatcccctctataaaacccccatcacaattctcaattcaaccaacccaaccaaactgaaccaaatcatcacacacacatactaagaagcaacaattcttctacaatggatctcctccttctggaaaagaccctcataggtctcttcctcgctgcggtggtcgccatcgccgtctccaccctccgcggccggaaattcaagctcccaccgggcccactccccgtcccaatcttcggcaactggctccaagtcggcgacgacctcaaccaccgcaacctcaccgatttggccaaaaaattcggtgacatcttcctcctccgcatggggcagcgcaacctcgtcgtggtttcttcccctgagctcgccaaagaggttctccacacgcagggcgtggagttcggctcccgcacccgcaacgtcgtcttcgacatcttcaccggaaagggccaagacatggtcttcaccgtctacggcgagcactggcgcaaaatgcgccgcatcatgaccgtccccttcttcaccaacaaggtatatagtgcaacaatttttttttctttatcagtaaacaaggttttcaatatcggttacgatcgcgttggttaaaatcatgatagattacagactaatgtggtccttctgttataacacacagttaaaaaaaacctggatgttgcagctaaatcaaggctgggaccatttttaaaaaatttattcagatattaattaatttttagtttttgttagcatggaatcgaacccagtcaacttttttttttaaaaaaatcattcaatcaaccttatatttttaggttgtgcaacaataccgccatggatgggaatcggaggctgccgccgtcgtcgaggacgtcaagaaaaaccccgacgccgccgtctccggcaccgtcatccgccgccgccttcagctcatgatgtacaacaacatgtaccgcataatgttcgaccggaggttcgagagcgaggaggatcccatcttccagaggctaagagccttgaacggagagaggagtcgcttggcgcagagctttgagtataactatggtgattttattcccatcttgagacccttcttgaagggttacttgaagatttgcaaggaggtgaaggagacgaggttgaagcttttcaaggattacttcgttgacgagaggaagtaagttttttctgtttcatttcctttccttcattcattacctcgcatgtaaacacccatatctggtgaatttaaagtggtggtgcattgtaaaaatttcactgatgttttaaaactacaaatacttaatgataaacaacaatgttagaaacacaaacgaagtgtacggaaaaaatgttaggagtatgaaaaatatttttaactgtgacgtcgtttccttttgttttggttttaaatcacttgtgtgattcctaaaatacctttttcattttggtactacactactacctttgattgagtcaactagtttttttttttttttttaaggagtaggagattaataatctttaaatgggtctaaaaaaagtttagcttcaactagggtggaaagtaaattttatttagtattaagattttttttttgcaactgtagcatattttttattttttttatatacgtcattgatgacttgatcctaaattaaatagccaattttaggagtaaattaaatagtcagtttctttgcaagttggaactttgggttattttatttatttctaatcaattcaattaaatggacattataacaggaagcttggaagcaccaagagcaccaacaacaataatgaacttaaatgcgctattgaccacattttggatgcccagagaaaaggcgagatcaacgaagacaacgtcctctacattgttgaaaacatcaacgttgctggtaagatgctttgcctaatatttttatcccccacgacaagaaatgtcctttatatattgttaaaattaaaatacaaacaaacaaaaataacaattatggtgcaggacaagtcaagtagagttactaaaattaattaaatttataaaatattttaatttaaatcatacatcttttttttcatttcatatatatatatatatatatatatatatatatatattaactttagaacaattaagcaaagtcggggcgtacgtcactttaaatgtagttatcttttcagcgtcgttaactgatgagaaatttatttgcttatataagaagttatggtgctgcaccgcaattgcatcaaccattttatagaaatgaagttttttaaaaaacaattgactgattcttttttccgaaatttaggttatttataaaagtacatataatttttctggtacaaggattgattgctgcctttataacctacataaaaattgcgccagtgatatttttactaacttttttttttttactaccaaacataacggtatttaatgagcacacaaatatttcatggtcattttcccgtttttttagagggggcgaacgggacacgtagttatggattcattgaatgaatgaataagggggttaggtggatggattgaactggtggctttcccatgccccatgttggggatcattcttatctctttctcaacttgtttgttctgacgtgtgaccttaattaatttaaacggatacttgttcttatctttcttatttttacgtagaaaaatatttattgtacaaccttgagttctctataatttgagagagaaaagaaaaaaaaagagataattgattaatttgattgatgatataatatgaaatgaagagagatatagaaaaaaaaaagaattgttgatgtaatgtttaaattttttttattgtcaacataccattactcttttatctatattgtgattgtggataactttttaattttgtttttgttgtgtttcactgttttctagtcccaaatatgagtcgaggttatcatactctgtcgtactggtggtagtagtaggtaatgatagtgaccaaacttttaggtggacccacctccgccaaaagtcgcatgtggtttacttgattattttggtttagattagaaagtaagagaagaaaaagatgcggggcttttaagttttcaaatagggtaggtacttgttaggagaaggggaaaacaaaaggcatggtatgattaagatggtatcatggaaatccaaaccttagtttagtttattgaaaaactacatatattatagagtttaacaaaaaaattattattgatataaataattattaaagataacctgattaatcatataaaacaatccgtgattaaatgattatataaaacatcatggataaattgtttattgtatattactatcatatatgatagttttttctgatgtggcaattatgtattattggaacagcaattgaaacaactctatggtcgattgagtggggcattgctgagcttgtgaaccacccagagatccagcaaaagttaagggatgagattgacagagttcttggagcagggcaccaagtgactgagccagacatccaaaagctcccatacctccaagcagtggtcaaggaaactcttcgtcttagaatggcaatccctctccttgtaccacacatgaacctccacgacgcaaagcttgggggctatgatatcccagctgagagcaagatcttggtgaatgcatggtggctggccaacaaccctgcacactggaagaagccagaggagttccggcctgagaggttcttcgaggaggagtcgcttgttgaagccaatggcaatgactttaggtaccttccctttggtgttggcagaagaagctgccctggaatcattcttgcattgccaattcttggcatcactttgggacgtttggtccaaaactttgagctcttgcctccccctggccagtcacagattgacactagtgagaaaggagggcaatttagcttgcacatactcaagcattccaccattgtggcaaagccaaggtcattttagactccaccacatgatcatgatcatatgatcaatccccttaattttttcttttttcttttcccttttctttactctgtattgtatcaatgcttgaaaatggggttgttccaaaaatgtcatatatatttggcctgctaatgggtattgtaaatctctgaacttgaagtgatgcacggttttgagatggttttctaataaacctacacttttgtctctaaatactctgtttcatatagtagaactttattgttgtagcagagccagtatttgtgtattactagcatgtctacttttagattgggctttgtgcattcatctctcttgaaaaattgcaactgcttgatgaactgaaaaaaaaaacgtaaaaaaagattttcaaataaaaatcttatttgaagtataaattattttaactagtaaatatattaaataatgtattttcattaactttttttatttctttaatactattaagtcattaattaaaaagacattcaaaattaattattaaataaagtagtttcttttaaagaaattacaatataacagtctataataatacattcattttggggttttaattcttttacatcacttttttaaaacttctttgcctccccctctctttattacattattacttatcatgcatatctcattactaaaaatacaatatccacgtataactacctccccctcttttcattattctcttcttctcgcgagtgtctatatcgtgttagatgtgaaatgatttgtgccatctcaagtcaaataagcgaaagtacaaaacagaagaacaataattaaaaaataaaaatctcttacaatattttgaatcaataatgattgtaaagtttactgtaataatttatgcagcttttcatatatagtttttagtagaaaataacggtattaaacaaaaagacataagaagtgaagagaaaaagacataagataagatgataagaagcatattggagcataataaatttaaagaaaaa

SEQ ID NO: 402 - DNA, 5564 bp, Glycine max; identical to SEQ ID NO: 282
  source 1..5564: mol_type = genomic DNA

SEQ ID NO: 403 - DNA, 10531 bp, Glycine max
  source 1..10531: mol_type = genomic DNA
atccttcagaagttataaatacaatgaactgcacctaatatacaattaaagtgtagtagcttagtggcaatgtgagtcctttcatgcttgtagggaaagggttcaaaaccagtccaaaatgttttcgcgttccttttccttaaaaaggaaaacaaggaaagaaaagcttccactgagattcgaacccagaacaaagaggtcatatacattgcatctaccactgaaccaacttgtactttgtttaatattcttaatttaaaatgtacattaacaattccaagacagtaaacaaaactcgcaagacttcatcttcaacctctagcgggggtaaaaaaagaagttattattaccttgatttcgaaaaatccacatcattatatgcattttagacacccaaaaatacattttaaatcatagaaaaattagaaaatttatatcattcctaattttaatgttattttgaattaaggaggcttaaaacataacacctatatattcaaaaaataaactcggtataataggaacgacccaatatatttgggtgattgcaaatatatttgcaaaaatatgagttaaatatgaatggaaaatgaaccagattcataagtaacaaatttttctaaaataataaaatattaagacacgtgcagcgtgcagacaacgtgcgcttccagcatcttcctcccaagtcccaagagtgtgacaggcgttcaatttaattggtccaacttgcacatttgattaaattactcgaatcacccatgtgggtatttccatctgctttattcctataaatagtatcatgactccttctctcactcggcgagtgaagtagacacttgaaataatgccaagtatactaaatgtcttagtcttaagaggggggaaaaactggaattccaatgattcttaatttcttacaatccaatctgcaaactgagtgagatatataacttgtttttgatttcttcctcatcattttgcatatacaaagattaaaatggaagggttttttggaaattgcttcaatatgattttgctgatgttgtgcttcaccaacttgagcatagcttttgctcaaagtcatatgaatggatttggagagcagccactggccaagattgccattcacaagaccgttttggcgctacacagttctgcttccattatagcagtcccttttgtgctaggaactaaggtacgtcttctcaacgtgttgcattagctaagtcctttcatctcaattgttcaataaacaattgagtgtatgtaggctggaagtgaatggaaattttattggatgttgttttcgtttctcaaaaaaaaaattatgtttggactcaagtatatctaatggaagttgaaaattttgcacactttacacggatctcaaatctattcgaaatgagtaatgatacttcaacattcatttattttaaatatgttattaacacttcatttattcatgtctcttttttcctatcatatcataaactttatagtagatttgttttttcgtgtttgaactttcctacttcaatgagaaggcttttaacatttattattaaatgatattattttcaaaagttattgaaaggaaaatattttgataaaataattttttatcatttaatcttatgtcttatcctaaatttatatattgaatatttaatttaacttttttttatttcttttaaatataattttaattttaactttaaatttaatttactactaaggatgaaaataggtcagatgacttgttaggagttacaacctgacttgtttattaaaaagactagatttagactttttaaaaaaaaaatttaattaaaaaagataaaatcaagattttaggctttaaaaaagtcggctaaacttgatagattgacctattgatattatatataattattaatattaacattaataataagtttgagagatctctttgtctattttgactcgttggcctaacgcatatatagatttattagcttgtctatgaatcttctatgaattcggtcatgtaaatacctaggctttcatgttagattggacttttaaatagaccaagttaaggcctaaaaagtaacatgctacaaggaaataggtcaaacttaggtttgaacggttttcactcctatttcctactgcttgaataaactaatatgaaattatttaaacttaatcatgtcttaagttcaaattttgattatacaattaccttaaatactcgaagtaaaggttttatcactcataataattttatcctacttaaacataattatattcattaagggatacatgtggtttataaaaaaattcaaatttaatttgatttactaactaactcggacaaaagaaaatctcaaattattctccttttatcattatttgtatctttctttatgtatgatattcatctttattactacttgaatgtcaataatatgtttaaggaatttgtcaacaagtaaaattaatattgtatcacagtataaattatgtattgtagattttttataaaaaaaaatatgtgcttaaaaatattaatttattatgaattttacttataatattatttatatattaataatatatgttcataacttatatattcaaaaacaagcacgagtattattgtgcaaaattaatacgtagcactttttgtttcaaatttcagaaaaataaaattgacctgatttggaaaatatcattttcttttttatgtgtatgaatttgagttcattctattttagtttagtttaattattaaaattaatattacgtataggctttagcctcagtaattgatttatggaatttacatttgtggacatggttggttatgtatgtatgttgcagggtgaggatacccaatgggtgactgtagagctagagtccccaataccatctgttgatgactgggtcggagttttttctccagcaaacttcaagtaatgtaccatcttatatgtgaaaaatgttagcaacatattgagtttgtagtggatgacttgaatttaattcatatgtgatttacaactaaagattaatctcatatctgatctaaaatatcgaagtttgtagaaatatttagagtcccactaaaaatctaaaaatcctaattataatgattattcaaaataattgtacaataaaagagagtctataaacgaaaagtacatttgctagcatttatagttatataaagttaactaaaatacattgtaaaaagtggacattcatcccaacaataaaaatgttcatggtgttgagtaaaacttttgtcatgggaataagctaggaacatatcgctattattgttgaaacaaactaaaggaagtctttttcttacatcacagttcagcaacatgtcctgacactgacggcattggctgggtagaggaaccatacatatgcacagccccaataaaggtaaaatgcaatgcaaccctacggggttaacttgtagatatgatcatattaatcaacaattttgcaacagggaatttctcacgttaattttatttgaatctttgtactgtactcctgttatgtgtattctttttagcaaatgaggcaaaacttatgctttgtttgtttcttaataaaacttcttttgcttagcaaaaaaacttatttgaatctttgtatcagtacaagtatgccaactactctaaccgaaactatgcaaagaccgggaaagctattttgaagttccagttgatcaatcaacgtgcagatttctcatttgcactattttcaggtggattatccgatgtaagttgtattttctaatcctatgtttgatatctccaacttctttttatttttattttatctaaactactaaagcatgccaatgttacgttcttttgctttataatttcatgaaaaatagtataatacatgaaaaggggttgttctcattcagaacaataattcaatctatgcttactagtattcatctggttgaacattgcagcctagacttgtggcaatttcgaattccatatcatttgcaaatcctaaagcacctgtgtatccgcgccttgctctaggaaaatcttgggatgaagtaagtttatcaatatttgctagagaaccttggttttatgtttctccaattagttgtattcaccacaagtctatattatcgtaattttcagaccacttagaaagtaatttaaattaacaagcaactcataatacaaggcacaaacaaatatgggaaagactactttttgatttgctgaaattaaataattgtaattgatgctaaggttttaacttttgctaacctttctgaaattgttgttatgggaattgactattattttacgtaaaggcagtagataattaagatacaaaattgttgttatgggaattgactattattgtagttcgcctccacctagaatatgttagatcttcctactaattactaagagtaaaggcagtagataattaagatacaaaattgacatatgacttggactactttttagatgacgcgtagttgtttatgggatatttgaccttacaattaagaatggattcatacttaattgggggttgtcctctattagtatgaggtggaagagtgtaagggcttgctataggatcaaaatttggggtagaagagatattattctgaaaaagagtaagagtttcaagtgatacctctacaaaattatttttgaattggatcaacagtgaatttgaggttgaaggagagattatactatcaccttcaaccatattctcatttacattattctaaatttgattctccatgttctcatccccattatcttgaattccatcctcttttgttgttggcataacatcaaataacctgatattttggtcaagtctatcataattctgcacctccaaatcacaccctctttgaggtgaagaatgaagtgttttcaagggaaaaaacatttcatgctcatgaaatgtaacatccattgatacaaaaaatctttttgtagatggatgataggccttatatcccttttgagtggtgttgtatcccaaaaaacacatttcattgctctagattttaactttgttcgctagtgaggatgcaaatgcacatatataacacaaccaaaaatatggggtggtaaatgattgacaaaattaaggatgaaatgatgagaaatgacatcaataggtctcttaaagtttaacacacttaagggaactctattaataagataaactgcaaagtttaaagcttcaccccataagtaagaagaaatattactaccaattaataatgatctagtaacctccaaaagatgtctattttttctctcggctactccattttgatgaggggaattaggacatgatgtttaatgaagaataccaataaatttcataaaatttgtcaactcatttttgtagtgttcgcctccattatcagacctgactatctttattggaatattaaattgtgtgcttatcattttgtgaaaaacttgaaaaacattacacatatcactttcgcatttaagaaggtataactaagtcattcttgtacggccatccacaaatgtcacaaaccatcgcattccattatgtgtaggaagaggggcaaatccctaaacatcagagtgaataatagaaaaaggagcattagctctattgttatttataggaaaagtagcgagatgattttttgtcattacacaagtttcacatttaaaatcaaagatatgacaatggttaaacaatgaagaaaatatctcttttattcttagcttgtgtttcatcacttatagagtgagccattgtttttcctttggtatattgagaattaccttccatatagtagaatccttcatttcttttatcacgactaatcttttcctttgtatattttatagagtacaatatgtgggaaagaacaagaaagcacagttatgggactttgttaattgactaacagagagaagattgcaattgagagaaggaacaaaaagcacattagaaataaataacaatggggaaatgaatattgtatcactacccataactggggaagaaacaccattagcatttatgatgactgaaatagaactattagagaaaaactgtgtaaacatatttctatcacaagtcatatggtttgttgcacctgtatcaattatccaatcactacccttagtaacaacagaaaaaccacaaattgttgaaatatacctgacttagcaacaaatccagtagcagcggtggagttttccttgggagactccaccttttttccttttgggtgtcattcaggataatttgtatcatcaagacgctcagatgtaaggattgaagacagatcctacatatgtggagtagaatttgatctatttgacctattctccattttcgtattcaaaagctagtctccaattcctaaagaagagaggtaattggagttggctctgataccatgttaagaaaatggtatttggtgattttgattaatatgagacagtgaataaatacatgatcttctctaccatctctccatgattattgaagacaaaatatcaaaacaaaattacaaataaaaaaggagaaaatatacagatatttgaatcaattacaattcaaatcatagttaatccttacaattaatggattcttacatttttatctaatgcagatgacagttacatggacaagtggatatgacataaatgaagctgtgccttttgttgagtggggaccaaagggaggaaagaaaacacgatctcatgctggaacattgacatttaaccgaaacagcatgtgtggtatgaaatattttcgtgtccttataattgaactagatttgcttgtttattacaaagtctaaattcttatagtaaactcaactatgtcatggaaaaatgtttgattcaaaggcacactaccactaccagaaggataatgataacaaaagtcctattccactaagtgagatcaattgcatgaattaaacaatacaattagactcagtcaaaaaccaaattttcaagaatattattcaccatgagattcctctaaataatttcctccaatgtctttcttgacctcttgtccctattttcaaagggctgaaaactatgtaatttagtttcctataaccttcttcgcacatatacaaattaccttaatcgattttctgttaaaaaaaaatctaaattggtgtcacaacaatctgttctcaaatacaatcattttgtatcatatcttgtgtaaccacacatttatcttaagattctcattaatgctacacctatttttttcctattgtccctttaaagcccaactatacagtatagttaggaagcacagtaactcacttcaacatatttgctatttatttgctttattgaaaatgaatatcaatgcatcagagattgataatgagcaattgatttagatgtgcagcgtaatgaggatattttgttattgtacaggtgaacctgcacgaactgttggttggcgtgaccctggttttatacacacaagtttcttaaaagaactgtggccaaattttaggtatgcaagaaactatacttttatgtttatgaaaccgtgatgatttgctgtatttttttctgaatgattttgttttgctcttcttaggtacacttacaagttggggcatatgctgtctaacggttcttatgtatggagtaagaagtattcattcaaggcatccccatatcctggacagaactctttgcaacgtgttatcatatttggtgacatgggaaaggtagtattcaaaaagaaaatgtatatagtattcccaaagaaaatatcgaatgaaagcacaaattttaagcatggctaataaaatggggaatatttaatttattttttgtttgcatgtcctttaggctgagcgtgatggttcaaatgaatatgctgattatcaaccgggttctctaaacaccacagaccaactcgtcaaggatttagaaaattatgacattgttttccacataggagacatgccttatgcaaatggatacatctcacaatgggaccaattcacagctcaagtgcaagaaatttcgtcaacagtaccatacatgattgcaaggttctttttgttgcaatcattttatgtcattgacatttaattcgagttttacatcttattagactgaaaatatccggttcattcatactgcagtggaaatcatgaacgtgactggccaaacacaggatcattctatgatactccagattcaggtggagaatgtggagtccctgcagaaaccatgtattattttcctgctgagaatagagccaaattctggtatgttacatcaatctaaatgcaaactatgatatgtttgacattagtaaatcagattttcttctataatttaaacttgtcatcccactttgtccaagattgtgaattttaccttcactaattgttaccaattcagtcttttataacttcatcttatctagaaaaggcactgcttcatccatatagttcataattattaggaaatcccatattgtctgtctcaattcttggaatgcaacttacatatttattggataatttcacttatagtcaattggttttaaattgaaatctaacagtaacgcaatttttagctttggcaactaaaaaaaaaaaacttttctacttttcgatggtaataattagtgcgtaaactacaataaacgatcaacattgcaaatatgcaggtataaagcagattatggcctgtttcgtttctgcatagcagatagtgaacatgactggagagaaggatcagaacaatacaaattcattgagcattgtcttgcaacagtagatagaaagcatcaaccatggctaatcttttcagctcatcgtccccttggctactcctctaatctttggtatggcatggagggttcatttgaagagcccatgggaagggaaagtttgcagaagctttggcaaaagtacaaagtagacattggattttatggtcatgtccataactatgaaagagtatgccccatttatcaggtatgcatatatgatagctagataccaagggggatctagctctgtgagttattgtaaattctttgttatctatcttcgattcttacgaataaaaaaatacaatgtctagctatatatactgcttctcatttcaattcaacattgtttttttaatcatcctaatgcatgtggtacagaatcaatgtgtgaatgaagaaaagcatcactactctggcactgtgaatggaacaattcatgtggttgttggtggagggggaagtcacctgtcagacttcacaccatcaccccctatttggagtctttatagggacgttgactatgggtttggcaaattgactgctttcaatcattcatatctcttgtttgagtacaagaaaagtagtgatggagaggtctacgactcctttaccatttcaagagactacagagatgttttggcctgtgtgcacgatggttgtgagaaaactactctagcaacatgagttatgttgtgtctatgtgtagacccgatatggacttgaaataaaataaattattgtccaaataaataatggttaatttacttacatccgctactccatatgaataatactgtaaaaacttcaaattaaaccgtcacattgccatagtgtgatgatcataacctacctgcattatttttttaacattgattatatatataattgatgtaaaaaataaatgttatattttgcataaatttatatgaataactaatttaaaaagtcattattatagattcacaacttatgtctaaccaaaaaatgacattttaattttataagaacaagtactgaattttacagacaagaattctaaatattttcatattaataatttgcagcaaggaaccactctcagatccatcactgttatttttttaaacctgaaaacatatgaagcactcattgacagcgagaactgcagagactattacgctgggatgagtaaaaaacataagttaggattgaagcatattggcttttttattacgaagtttttattgtcatggaaaaatgtttgatttgaaagcacaactttgttcataatttcaaaaactaaaaacagttttagaaaatagaaatcaaacacacaccactcactttaatagaactgctcaaatcaatgcacgagacattgatagtaggctattaatttagatgtgtagcataataaagaaattttgttatatattccgaaggtgaacctgcaagaactgttggcaggcgtgaccctagttttatacacacaagtttcctcaaagaactttggcaaaatttgaggtattcattgttggtaaatctttgtgttttaatttaaaatttataaatatatattaatttcattttacaaaataaaatatttattttagatcttcttaagattttgttttaatgagtcaactagtttattagatttgttttgacaactataggttagtttccaacggtcatatttccaacg

SEQ ID NO: 404 - DNA, 9139 bp, Glycine max; identical to SEQ ID NO: 367
  source 1..9139: mol_type = genomic DNA

SEQ ID NO: 405 - DNA, 5921 bp, Glycine max
  source 1..5921: mol_type = genomic DNA
tatatatatatattgattaaattataactagaaaaatatataaaacatgtatgcgataattttcacgtttcagaacttaaaaataaattctgtttttcatttaaatttttatattttttcaacttgaagaaatgttttccttttttattttataacaaaaattttaaatacatcattatttaaaaattatttttaaatatttaaaatgaataaattattgtttttttaaaaaaaaatcttttagttgatattctaaattcaacaacccttaaaaaattccttttaataattttttatttccatctcaaaccttaattatttctatcctaaaaatgttttttattttaaattttttactgttaaatttaaattaattacttaaatgaatgaacaaaatatatttttttatcttttatcttatttttttagaagtttaaatttttttaactttaatctcttaaagtgtttttgttagattaattaatcctttagtcagtttttatcactaacaatgccaatgacaaacattcctattaagtgtcatatttttagtttcttatcaagataagaaaaataaaatagtgtggtaaattgatggaaaaataaacttgatttaacatattaccttaagatataagataataaaaaataaaattcgaggatcaaactaaaaaatatgacttgggaaaaatacaatagtttagcctaaattaagaaaagcatggatggagtaaacgaaatattgccagtgatgttacagattggcgtatgtatttgggttgtgatgttattaaggaatcttgcaatgcggagaatattcgtggagtccagcatttcgacgccaatcataaagcctctgaccattaacattcttaagataaaatcgttcacaccaagaccccattatttaataacagttgaaaccaatatattggactcggaaacgatgaagtgagcaacacaacacaaccagacccatcgttatcttatctccttctccatggcttccttacccagtaaggccttttcacttttcagaatcccttcacctttttttatgtttttccttcgcatttctcttctttcgtttttttttctcctttttttttttgtttctgttgatctgagcgagatgcgtagaaaatttctgagtatttgatctggaaccattgttgtttcttaattaatcaacgaccctttgccatttagtttctaaatggatcttgtgtcatatagattttaagtcagaaattcatgcttcagtttcatcactcatttgagtcagcattcaaatttaccataatatccataccattgtcttcatttgtagtttttctcccacttgggatgtatgcttttcatgtttgtgtgaaaattgttgttttggctgccgttttcccagctaaattgtatcttttaacttggtctaataaatctgaacttaaacaggttttactccttttgtatttctattgcttgtcattggatgcaatgcaaggcctttgtatccacttcccagcaaaggtgatgatggaaataggaagcccctacaaacttttcgcccttataacattgctcatcgcggttcaaacggagagcttcctgaggaaactcatcctgcatacttggtgagaagactcttttcactaaacttaaatttttcggatatggaaattgactataattgttttttcatcaaatgcaatcatgctacaattatgcacaaactattattaggcaagatgtagatgacataatgaatatcattgccatctttggcatatgcttgctcaaaaacgaatctttcttgcagagagctattgaggagggtgcagacttcattgaaactgatatcttatcatccaaagatggtgttcttgtatgtttccatgatgttacccttgataatactactgacattgcaaatcgcacagagtttgctaatcgtaaaagaacatatgaagtccaaggggaaaacatgactggcttttttactggtagtgtagctaaacttgctatccattgttcaacttccttgcaaatttccttaatgaaattattagggtgttgatctgattgcttctgtctgtgacataaatgcataagcttgaaattcatctcaattttcattgtttttagggacaagtatttcaggtctgcttatgtttcaaattctataattttgtttaaagtcttattttccatctaaacaagtttgcttcttgttcgaataatctaatatgccaaaataagtttacttgtttgtatatttgcagttgatttcacattaaaggaattaaagtcattgagggtgaaacagaggtgtagcttcagggaccaacagtttaatggttagtcccttctttgcagtattgtgttattttctttcgtttgtttgacttgttcattcattggttctgaaatattctgttaccacagttcactacctgatagttctaaaatcattatcaatattttttttaattcatgatagattttgataagaatgacataaatactgaaaataagatggaactgaaggaggaaatctcctctacaaggaaaaattagttctcaacaaacaaaaacagagatgctggaatagaagaaatgaagaaaatgcagtaaagagaatacaaccagagctcaaacacagactatgccctccctgacctaagccaccaaatcctctccaaaattcaattgtcctctccaccattttccaccctctcctaattcactttccctttcctcccccatccttgcaatatttttttctcttgctgccaactgtgcattgttacattattcccctacacacagaagagtggaactaattttttttttcatttttagggaagctggctgctgatggcttgttttttctcttttgaaaactacatgaaactaatattgctttagcacacattaaaagtagctgttagtctacaactttatacttggaatctatttcaggaaagtttcaaatcatcacttttgaagagttcattaccatagcactggatgcacccagagttgttggaatatatccagagataaaaaatccagtatttatcaatcaacatgtgagtatttctttctagaatccaacaaatgtacatgttaggagaggggggatttgtagcaacaaagataagttgttccaaaaggcatacctgttgatatataattcatctaactgaagaatacattagaatccaccattcttattgtacatatgtatttgatggttagtgctggactgctcgtggtattgcacactcaatgaaataaattcccatctttaaattaatgctaatgagtattacaggaggtgagattatgttgttggaagtttataagggtgcaaattgcattaagaattcttctaccctgttagattgttttatgaaaaatcttacaatttcatgcttgataatttggtcttaatagtaatatgttttagccaagttcttttagaggctttgtgtcctttctgttcattaagttgatacaatcaacaggttaaatggtcccatggcaaaagatttgaggacaagtttgtggagacacttcagaaatatgggtacaagggttcctacctgtcaaaagattggttgagacaacctgtatttattcagtcatttgctccaacttcactcgtgtatatatcaaataaaacggacttgcccaaggttttcttaattgatgatgttactgttccaactcaagacactaatcaggtgtgtaatacattttatcctcgatgtccgagctgctttaggattattgaactttttggaacaacacgttttttttttcaatggaatttgttatacttgtgaagttaataatttatatcatgatggtacatcttctgatcttcagaccttaaaaagtatcacattacaaagagaaagcataagtagtcccaacagtgcagctttatactcgttttgtatggagaatagggaacacttttctttctttgtgttgtataaatggaggaatgtaaatgaagaatgtattgcattctttccaaataccttctcaattttcactctactatttttcagctttccactgtcattcttgccagcacactcaatgctggtttccttaaaaaaatgttgaaattggaaaaagccctgccctaggagattatccattcctacttgactaaaccttggcacactcaatgcatttatgtaatttctgctttttcaaaagtaatactgtctccattttatgttacacgaaattgttttcactgtctattccaaagcctaataaaagtactgtgatgacaatgtgcagtcatattgggagattacatctgatgaatacctagagtacataaagcaatatgttgtgggaattggaccttggaaggacacagtggtacctgtggtaaaaaattatatgacaaatcctactaatcttgttgccagggcacatgctcataacctgcaggtacagttcttgtttaaagcttattttgttcttacgatttcatggatttgatcatttttggaagattgagcggatttattcttgattttgttgtcttatatgttttgtgtgtatctgtttgacattgttcctctttaatctattgtattgtcttccattaatggtttgagccaaacaaatgacaatagaattgctaatattggtgcaggtgcatccatatacttaccgaaatgagttcccatttttgcatttcaacttcagtcaagatccgtatatggaatatgatttctggatcaacaagataggcgttgatggtctctttacagacttcactggtagtcttcatcgttatcaggaatggacctctaaccgtaaagatgatgatgatgacaagactgaatccaatctattacataaaattgctttgttagtctcctcttatgaatgatcttgagaattcagatggtgtataagtgtttggattaatttattgtgttcaaaagacgctaataacaatatttacaagagagcttttgagttttgacttaagtctgaaaattaagcaaaataaaaaatcactaatcacagtgaatgaccaagtgctggaactgaatgtaaagtttgtgtaactataaccaaaacgtaaaaataatgcaagtaaaggaactaaaatgataataccccacccacatggtaaagcatgaacattgtcgaattttcacgataatgcacctcccacgtgtcaatatttgaccttcctactctcctgaatcttgaaaagttttggtatggaacatttttctatttatatttatatatatataactgttaactaatatatcacatgaaaatcttaataattatattttttccaatattaaactgaaatataagcatgtgttgcagcagaaatgtctgaaaaagtttcaaccactcacaacacaatttgtcaacaagacctatgctattttgggcatgtttgtgaacctgttacgttcaagttgcacaaattccaaggtgtcattttgtgagaagtaacaatttgtcacttttgcttaaacagccggttgaggggtttcaaatgttaaaacaaacacaccctttgccattttaacatcatcaaacagattcaaacatcactcagacacttaatagtgattaagaacgatggagcttaaaaaccatagtgccatcaatttatcccttctgattcacacaatcaccaaaaacaactacattaatgctagaaatgtgattgctctgtcaatcagttgtttcaggcatctcaaacaaaagtcaaagctaataacacgttttcttttctattagagctattataagacaacatcctagattgctgtcagtacaaaaggaggtgcaacctttagcactgctgatactaataataccaacttcacaataaatttccaccactgaagcataacttt

SEQ ID NO: 406 - DNA, 5083 bp, Glycine max
  source 1..5083: mol_type = genomic DNA
attaaaatatttaataaatggtaatataaaaaagagagttgaataaaatgatataaaatcatcttatcaaatacgatacactaaaacccaaaaaaaaatataacagttttgaaaatgtgtgttttattaggaataaattactgtatgaagtatgaaataaatttgaatttaaatttatatctttgagttgataagtgtgagatatactgaaaaaaatctaaattctatgaaaaaatatgttttcaattcctataaatatagctttattttttaaaaaaaaaaatggaagattgttttttagttttaattcttatgattatttaataataacatgatatacatcagacatgttacattataagttatcttttaattattaacgttatatagttaaattatctataaaaaaagttatatagttaaaggtatgataggtcacaattaagtaaatataagaattattttaaaaagataaatttacgaagactaaaacaaataaaaagattaaagataaagattaaatgaagtcaagtttatagaaatttaatttacaacatatttacacctaaatttaaattttggatagtcagttactacggattcttgttatctctagttatcatgtaattggttgtgcaaatttccggtgttgtgcattgcatcataggcataatcttatcaattgagtctttctaattttctattttttaatagataaaaaaagattagaaactctttgccacttgtcaaagccttgccaccgtctctgttattaagttattattattattgtgctataaataagttgagaagaacaaagtgttgaacacttcaacatctcttaataaagattagaaatcgacatatggggggagcaaagagttactcttgttttgcagtaatagctgtggccttggttttgctacttctgaatgtggctgtggtttgcaatggaggcaagacaagcacattcattaggaaggttgagaaaactgaggacatgccccttcatagtgatgtatttgttgccccttctggctataatgctcctcagcaggtacctctttttcctcctataaacatcgtagaatttgggtgtgacattaccttttgtatatattatttttgtcacattactggtcaatgtaggattttcaaagcatcccttaagtttacatgactaaacatctttggatgatctgataacaagccaataataggtggtctgatagactcaacaacaactattaggataatctatgatacaattttagattttagattttagcctaattcaacccgaaaaattaatttatctagcaagagttgcattctacttgtatactttattttagctatataagtataattgagatctccaatatttcacgacattaattaatgtcttttattggtgacaaattaacatgtttttgtatttgttttgtaggttcatataacacaaggtgaccaagtgggaagggccatgatcgtgtcatgggtgactgtggacgaaccaggaaagagtctagtgcattactggagtgacgccagccagcacaagagagtggccaagggaaatcatgtcacatatagatacttcaattattcttctggttttatacatcactgcacccttagagatttagaggtaagagggcatgtaattactgcaacacctaactcttgtctattttattttaggcaaatggtgagaacactgattaaggaattttataaaggtttttattgggatgcataaaattatgttacttataatctttttttatgctcttatgatttctacaataaatacttactccttttattagggcaccgattcataaaaccctttattttatcacacattagtaaggttgttaactcaagtttttcattttggcagtttaacacaaaatattattatgaagttggaattgggcatactactaggcaattttggtttgtgactcctcctgaagttcaccctgatgcgccttatacatttggtctcattggcaagtttatattctctcaaaactacaatgtttggttgctttacacttactttttgtaaacccaatactattgacattgaggtttaagaatgccaaatttaatttttagatgattgggctttctttgcaggtgatctgggtcaaacttttgattcaaacaagacccttgttcactatgaatcaaaccctcacaaaggacaagctgtgttgtatgttggagacctctcttatgcagataatcacccaaatcatgataacgttaggtgggatacgtggggaagattcgtagaaagaagtactgcttatcaaccttggatatggactacagggaaccatgaacttgactatgctcctgaaattgtaagttgtccacttgatttgctgagattagttttttgatatacaatgaactataataaggttagaacctaagacttcatgccactagctaagtctctaccacgagtctgaccttagagagttagagcatgtttggttatcagttgaaaaaggaattttgggtgttgaatgtacttctagagagtaaactcatttaggtaacatgtttggttaccctcaaaagtgtgtttgcaagacttggtgcatgtttggtttttcatccaacttgaagggcatgaattctaagacaaaatccaatggtccaacgaaaattgaacccaaaagcaagggtggggatgcttttgcaaatttcattttgctgccaacttacatttgcactaataaaccaaacatgcacggttgcttttgcaaacttaagtttgcaaactttaatctaaacatacacttatttgttcgaattatttgtatgagtttgatattattctcaatgtaattcctcaaacttgaaattatgattcatgattcttctactaaatgcaaattttagtacataagtaaattctaaagaccaaaattgatgatacttttcaggatgaaacagaacctttcaagcctttccgccaccgttactatgtgccttacaaagcatccggaagtactgaacccttttggtattctgtcaagatagcttcggcacacatcatagttttggcttcatattcagcttatggtaatattagatgcaccattttttctcttaacattaccttataatcttaaagttttgctgaaaagattattgttcataattcaaagctgaatcgcttccttatatttttcatatatacaccttttttgcactaaacatcattttccttgttcaggcaaatatactccccaatatgaatggcttgaggcagagctaccaaaggttgatagaaccaagaccccttggttgattgttcttgtgcattctccatggtataatagttacaactatcattacatggaaggggaaaccatgagggtaatgtttgagccttggtttgtgaagtacaaggttgatgttgtgtttgctggtcacgtccatgcctatgaacgaagtgtaagtgctaaaaagtgctccatttcattaggtgtcatgaatctaacattgctggggagaatgataaaaccacaacaatgctataaattttttcatactgtcaatcaattataaatcatcttaaatataaacaatcttatcgtacttgataatttataattatatgcaccccatatcaggaacgaatctccaacactggatacaacattaccaatggtcgatgcaggcctttgaaggaccagtcagctcctgtatacataaacattggtgatggagggaacattgaaggcttggcaagcaagtaagctctataaattttttcttccttatattaatggcttgtctaatgtctcttctataacaagtttaatttgattactgatttgtgttttttctttgcactgcagcatgacaaatccacagcccgagtattctgcatacagggaagcaagttttgggcatgccattttggaaataaagaacagaacacatgctcactatagctggcaccgaaatgaagatgaatatgctgttacagctgactctatgtggtttttcaacagatactggcatcctgttgatgactccacaaccaagtgaactaataggatagttctgcagagttttcctatctaaaaatatccgttttataatgtattgttgggtgatgtacacttgttattgaagtaaattcaatgttttctttggtaaaccttgttttgttgccctcggtgtcagttttctgagtgtttgaattttttcatctaaaatctgatggatcttccttcactgaattcattcttgacatttttaatctctaaaaacatattagcaacccaaattaccccttaaaaatattaactaaaataggtaaagaactaaaatgtcttaaatttgttcttccttttcattaaaatgattcaagatattcataaaaatattagaatctctcatctgtaacaaatgattgaagatgacatagaattagaatcaatgttattttattattacatgtactaatatcattatataggttttttttcagcaaaaatattatatcgggttcggatgaatttatcgggttgaaatttatgaacccaatgtcaaaacttaattagaattggatcaatttaaataaactcaatttaacccaatgacttggccaaacttgaaatgtagttgaattgggatgattgtgttggttgatcaattgcaactggcttacattccaactattttgttttcaaaaattaaattagatgactatttcttgtaggagtagaattgggtatttattttaaaaattggacggtgtgtacatatattggaaaagaaattttcaaagttaaagcattttgaggtattaacataaaaggttattctaacgactatttcgtccatatatactactaactataatattttcgaaatctactaaatgctcagttggaataatggagatattttttgacgcggtagctgccaacaaaaagaagccattggaattggatgagccaaccagatgagtcaatcaacaagtttggtaaacaagataaaatataacaatttttttggattatataagaatagttaaaattat

SEQ ID NO: 407 - DNA, 3813 bp, Glycine max
  source 1..3813: mol_type = genomic DNA
attttaaataaaataagtaatagtattaattatactacactgtagtaattaataacataaatattgctatactttatgatacatgattaatatgtagcataaaatttttattatttttagttcataatttctaaatcaaattttcacaaatttttaattgttaaaatttaatatattttatagcgctgttccataatacattttgcgcataacatgcatatctttaatttagattttaatttaaaaatatatagttaaaaaattatttcataaaatcattgtctattaaatatataattatacacatatataatgaacaacaaagattaataattaaaaatgttatactttaattgttaataacttttcatataaaattaagaaaatatttataaaaaatatttaattcgtgcatgacactgacaagacactttagttttacatacagaataaatcaaaccaaaattattctattaaatatattattttttccatacgtgaacacatgagaatcttacactgttgtattaattctatatatgagtttaataaatcaatcaaaattgggttttcaaattcttctagttaatctatatactcagaaaacaagtattcaagaagggtcatatagcaatttcgagaatattaatccctatcttaaaaatatagaagggctataaggtaatatgaaaaatattggctaacctatgataaacagtcatatgtagttatgtacgctgggaccttgatgctccaacaggtaacaagtccatgtaataacacaccgacatggtagttaacaaaaaatgtaaaccaagagtttatcctcaagcatgattctaaacggcagcataaacacgccaaaaatcttcggctctggcccttgggccccttcaagcgacattattgttcaaccttaataaatttatattattaggtatttactactattaattgacgtacaagactgaaacgcgtagccaagttttgtgacttggaaaggataaacgaaggaagttgggccaatgaaaatggtttggcactttcctacctaaagagagagatgggtggggacgtatcgtatggccttatgaggagctacctcacctcacacaccaatagcatatgaagagagagaagaagtgaagataagcacagagagtgtcatctactcacctctactaccataaaaaaagaaaaacaaaaagccttcagagtcgactattcatcctttcttattcttaattaccgtgccttatccacccccaactatatttcagccagccgcggcgacacaacaacgccgacaccctcatttccactaccaactattctctctcgttctctgatttctgaaatccctcacccatggcttcctcttccctctctctctcactctctctcaccctttgccttgtttccactctctgctacgctcacacatcttccctaaccctacctgtgacaaaagaccattcaacacaccaatacctaacaatcctctcttatggcacccctgttgagtctgcaaaatttgtgcttgatctcggaggctcactcctctgggctgattgtgcatccagaaccaccccatcttccaccctcgcccccattttccaccgttcaattcgctgcctcacagcaaagggtcctgaaattgagacccacaggtggctctcgagtcttgcaaatcctatagatcaagatcagccatgtcaaattacagcagagaacagcatcacggggaaaagggtcaccgaaggagagcttgtggaagacctagtgattcatcgttctcacgagcttctcttcacgtgctcgcccacttttcttttgaatggtttagccactgatgctaaaggcattataggtcttgataaatctcgtatttctttctcatcacaagtttttcactcacttaaaatccagagaaaaatcactctttgcctttctcacacttctggtgttattcaatttggaaaaatgacgcataaatcccaaactgaatctgaaattttcagatatcttactttcacaccccttgtcgcaaaccaagacccgacacagacccagtcttcaatcaacgttaattccgtcaaaatcaacggcaaaaaggttgcttttgacacccccttaggtgggggcgcgcagctgagcacggtcgtgccttacaccactctccaaacctcgatctatgataacttcgaaagcgcttatttgaaagccgcttcgtctatggacatgaaaagggtcgatccagtttccccctttgggctttgcttcgaatccaatggcgttggaagctcccaagtggggcccaacgtgccgatcattgatctggtgctgcagagcgagatggtgaagtggagcatatacggaagaaactctatggtgcaggtgagcgacgatgttatgtgcttagggtttgttgatggaggtgagaatcccagaaattcaattgtgattggagggtttcaattggaggatgtgttggtgcagattgattttgatacttccatggtgggatttagtccttcccttctcacgaagcaagctagttgctctgatttccaaccatagtttcaaaccatagttttctggtgaatggtgataatagctttttgttatctataccacataatttttcttagattaagatgagtttcgaagagttttaaagggttctgcaatatccttttctttttttttctcctaccatatgtgtatataattacttaagtggcttatctatggtgatgatatttttgtttgaaatttataagatgaaaaaattttggttgagttatgacttatgagctacttgacccatttgatggaagcatatgattgactgattttgtttttgtttaatttttaattgctcggtgtgattgataagaaacgcattttcctgtggaatgttgatagtgggaaaagcatatccgttataaggggaaggtaaagatacaatacagctcatagcacacagttttcaaaagatgtggcgcacagaatatctttttattccttcaagatgttggctagtgatacataaattaattacccatagttctcttttcccccacaaaataaagcttctgcaattatttttcttcgcagctatagtcaattcaaataatcttaagaaagcaactctacaaagtacagcgagtctcataatccgtcgcatggaattttattttgtagtagtatattttaagccttcctgcgcttcataattcaaatttcaattttaaaattattttgaaatattacgtcggaatataattaagtgcatcactcttacattaataatcctgtctttggaaaaaagttaataaaaaacaaaaattaatggacgtttgcgttggtaaacgctagcaaagtttctccttttacattaaacatccccagcctctcagtcacattacacagaaaatttaacattatgaaactgggactaaaagtgggtatatttaaaaaaacaatgtaccaaagagtatagtttgaaaacaatttgcatgagttgtttttatcaagtaggatctaagaggcataataagtgatattttgtgtttgtttttttcttatagcataaggaagtcggctttgaatggatgttttttatttttggttgtcatactgaaccatgagacaccgataagcatgacttctcttgggtacacgatgaaatataaatacactgtcactgagtgtggtgcttcctcctcactcataccatgtaaattgtttccatattatactctttggttaagttgttttttaaaaaaatccatttttgtcaaagaaaaa

SEQ ID NO: 408 - DNA, 3306 bp, Glycine max; identical to SEQ ID NO: 290
  source 1..3306: mol_type = genomic DNA

SEQ ID NO: 409 - DNA, 3653 bp, Glycine max
  source 1..3653: mol_type = genomic DNA
ccgacattacacctcaccactaacaagcagttgaggacaccacaaaacctacccagaagggaacaaaatcattgaagccccagcataactactaactagactaatttaggttgcaataggattttggtgtgataggtgacggtgcatgacgttttgatagtggaggttgggtcgccgacatttgggttgatgattgtgggggatagggtagtgcaattggtttgaattatggtttggtgtttggaggtgtgggtggtggccgtttgaggcattgatgatggagtttggaagtaggtggtggtgcgttttggactggtgatggtttcgttagacaaatgttgaaggaaaagaagataggagaagggtaggtcgagagtatcgaagacgaagctggtaacaaagttggtagtaattacaactcatgtcaccacgtttttcttttagaaagaacattgaaaacgacaaatccttattttcagttttcagtcttttcttgagaatattttaactgaaaatattttcaaaatttaaaatacacacattttcaaatgtattttttgtttttattgaaaatgaaaacagaaaaagaacacaccaaacaccccctaagtattcatccaaataatatgttccatccattctattatcattgttattcttttatacaaatcaagaaaaactaataaataaattaaaaacaaaaataattttacaaaattaactttatgaatatcattaatttatttttagatttttttaattcatatcattaatattataaaaaataattaattaatattacattaaaaaactaaaataataattatttaattttttttacacaaccattattattaaaagtaagcagcatccatggttttgacaaaagttagatggtttgactacacgttaacatgtgagttgtcctcaacatatatactacacctgcacgaagggttcaaagatggcaactccaatccgtatataaaagagaggtccctccaagttcattcatacaatacttgtcataagtcacaaccatggataattccaaccttcaacgtctcttcactctcttccttttttccctaattgcaccctctttggctcaacaatccttcagacccagagccctcgttgtcccagttaaaaaagacgcttccaccctccaatatattactcaaatcaaacaaagaacaccactcgtcccagaaaacctagtacttgacatcggtggccaattcctgtgggtcgattgcgacaacaactacgtctcctccacttaccgccccgcacggtgtggctccgcccagtgctccctcgccagatccgacagctgcggaaactgcttctccgccccaaaacccggctgcaacaacaacacgtgcggcgtcacgccagacaacaccgtcaccggcaccgccaccagcggcgagctcgcgcaagacgtcgtctccctccaatccaccaacggtttcaaccctatacaaaacgccaccgtttcgcgcttcttattctcctgcgctccaaccttcttactccaaggcctcgccaccggtgtcagcggcatggccggtctcggcagaactagaattgctctcccctcgcagctcgcttccgctttcagcttccgtagaaaattcgccgtctgcctctcatcttcaaacggcgtcgctttcttcggtgacggaccctacgttcttctccccaacgtcgacgcttctcagctactcaccttcacgccgttattaattaaccccgttagcaccgcctctgctttctcccagggagagccttccgccgagtatttcatcggcgtgaaatcgattaaaatcgacgaaaagacagtgccgttaaacaccactttgttgtccataaacagcaaaggcgttggtggaaccaagattagttccgttaacccttacactgttttggaggattctatcttcaaagcggtgacggaggctttcgtgaaagcttcttctgctaggaacataacgagggtggcttctgtggcgccgtttgaggtgtgcttcagtagggagaacgtgctcgccacgcggttgggggcggcggtgccaactattgagcttgtgctgcagaaccagaagacggtttggaggatttttggagcgaactcgatggttagtgtgagcgatgataaggtgctatgccttgggtttgtgaatggaggtgagaatccgaggacttcgatagtgattggaggatatcagctggaggataatcttttgcagttcgatttggctacttcaagattgggattcagctctttgctctatggaagccgaactacgtgtgctaacttcaactttacctccgctgcgtagaaggaaaacgtttcaataattagcattatctcattctctcattcataataaatgccgcctgcggaatttaggttgagcttcgcaactacgagtttcaaataaactgttaaacacaagtattttctatttccttttgatacatacagggttcatgttttttaatttggataagcccctacatggttcatgtatcttataagtttgaatatttgttcagagacaaacgtaatccaagtgtgggacaccttcattgctctttgtcttgcattatatacacatttaaatgcatattttttattaataaatattaatgcttagtattgctaattttttttgttagcgaaagatttgagtttatgattgttttttatcattaaatcaattttatatttgcttttgataatacatgttaatattagcttttagataagattcatttacatgtatataaatggattttaatttaatcaatctcttttcagtaattaaaatactagtaatagttttcttaaaatatgttttcctggtcaacttcgaacacacttcttgacacaacttcatgacacggatgaaagatacgtcacttatgacttcatatggccaacaatgttcccaacatcggagtcaattcaacctcaacttgacatgacttcatcaccattcgccacagcttcaacacttcaccgaagcccaaggttgtacgctcttcgagttagatttaattagtttatttcacaaggttaaacgttaacttaattatagtggatagtttattggattctcaaagtaattatactgggattaaataactctgataaattattaatgtaattaaaaaaaattataccaatcatctttaagtatatagaaaatctcatttattaagagttgtttaaccttatttttaattgagataagataaacaatgccataactttttacatataaaattcttttatcaatataaaagggcatataaagagtatctttttagaattgggaaaatggccccccatttcccattgggccaagcatataaaattggtttccccggcccaaattttctatgggctgtattttttttttttgccaggacaagtcggtggtttgttaatcaagattgaattgatttatttttctttttctttttttttctaaatttgtataaattaaagttttttcccctaaaaaagtggacttatatttcttgagcccgacctggcccattttgtcattttacttttacaattaatttaaccgatagttttacaaagctctttaaacttcattaacttattcgttatc

SEQ ID NO: 410 - DNA, 5629 bp, Glycine max
  source 1..5629: mol_type = genomic DNA
atatagttatcttgattataacttatctaaaatacttttacaattttgacgatatatatatatatatatataataataataataatttataactaaatgatgttataaaattatttttaaatatttgtgtatcattttttagcaaattattaaatcaaattaataaaattaagaaaattgacccaagatatatgatttggtttaatttttataaagttgtaatattcactaacaaataataaaagtgactatttacttgcatgtaaattaataaaccactgacttaaaataattactgtatgacatagactgggttaaaatatattttaaaattttattttttaagtagctcatgcttcttggtcccattgattattgagattttatcattttttgtatgacatagacggtaaaaaaatctcaggaaattcaacaggaagaaacgagccgcagtgtcgcgtaagcaaaagaagatagaatatgccatttaaaatgcgaaaacgatactctttctctctctctttttaataattttattttagtttgttttcaaaaaataaaaatttaaattttagtctaattgtaaaagaaaagtacgacaaacaagtaaatttatgttttttttcttaatttttttaggtatttattataatggtatgcttgaaagattaaaaagaaaaaaactataaatattacattatattttaaataaataataattttttaaagcgctcacaaattgatgtgtcatataaaatagatggacagaagttatggaattagatagaattatgacacttttttaatttttgacaaatttaaattttcgaatttatcaacacactagagttaaaaacgattatttattattttatttcacatcccatgcccttatcaaaggaatgaatcaataatcaaacattcatgattcaacaatgaagaattgattcaattcatagtctcaatcttccaaatttatcacagatccaaatccaccaccatgattcccgatctacccctccccttcctcttctccttattcatcatcttcttccacctcgctgaatccaaaccctccctcaccgccacgccaaccaccctcccagcctccggcgccaccgtcaatctccgctggtccggcatcccttccccctccgacctcgacttcctcgccatctattcccctccgacctccccgcacgacaacttcatcggatacctcttcctctcgcagtccgccacgtggcgcaccggctccggcaacctctccctccccctcgtcgacctccgctccaactactcgttccgcatcttcagctggacccgcgccgagatcaaccccaagcgccaggaccacgatcacaaccctctcccggtcacacgccacctcctcgcgttttcggaggaggtctccttcgcccctcaccgtgggccccaacagatccacctggcgttcgttggggcccacggcaaggaggaggatatgcgcgtgatgtacatcacgcgcgatccgagagagacctacgtaaggtacggggagagggaggataagcttgatgggattgcggtcgcacgtgtggagaggtacgagagggagcacatgtgcgacgcgcctgccaacacgagtgttgggtggagggaccctgggtttatccacgacgccgttctcataggtttgaagaagggacagaggtattattacaaggtaataatgactaataacgttcttttattacatattaagttttgaaaaaaaaaatcttataatcaagatcaaagggagtaggtagttgttagtttttattttttgttgagaagctagagacacgccctcatacacttttttaaacacaccctctaatgaaggtagtaattggaacctgctactgttattggaataaaccatcaaatttttttttttgaaagcattattctctctcctaaagtaatgaaattaggatttatttgaatacaattttatttatccgtgagatttactgacctaaattcccgtggttatttagatacaagctacttgaagaacttgtgaaaatatacaacttattagaactttttatataagtagtttttaaagtattagaatagttgttcaagtattgaaacaatccttcaaattagtctctcagcgttagtaaaaatatatcaatgtagagaataaactgacggatttttaatatcttagggactacttataaaacttcattactttaagattatttaggaaataaaataatactttagggacaaattgttggtttactctatctattcgggattttgttctaaggcttattaatgttggtcgctaaatgtggtaaaattatggtcctgagtgttggttattttggctctgaggctgatcaatgctactctagtgtgtcttgtggggttacattaagtggcatgctgcttaggtgctacatttggcactaatgggtgtgtcaagctggcatttgaaagggcttatttatgtgaaagtggttttagaccttttaataagctcttgatttgttttaaagagtttattgcatcataagtgtacacatatactgtatactgtattcaataggatttaatgactttactcagtggtcctgtttattaatgtgatgtatggaagtttgcgtaagaacatttcacactattaacaaatataaattgaagaataaatgcaccagttatgtagagattttttgcaccgttatctaatcataaatggacagttatgtgtgacaggtttattactagtaacttttataataacttccagtttattgattaatctttgtatgctgactctgtaaaaaatttatgttattagccaataagaaatcatagtaggcatgaattttgacgtaattattcaataagtttattatacctggcaatttctaatttctaattggttgacattgtaaaaaccctttacactctcaatgcatatactattttctctaaaagttatatatgatttcttatttattgacattgtaaaaactttacattgaccatgcatgcctattaaactcgaactaaattctattttaaaaatcttattaaaatgtgtcagtaagtttcatggttacacaggtgaataagttttcattttgataaaagaatgttgaataagagtttaattaagcccaaacccaaatatttgctaatgcccaagtcagggtttaattttgcttttgtcaggactaatttgtctggtgttaatcaatttctggaacaaaattgtttctttgctccaaaacagtgagaccttatgaatggagaaatgttgagatattaactgtttaaatctaatttaatatgtaccaggttggaaatgataacggaggttggagtgcaactcaaagttttgtgtcgaggaatagtgattcagacgaaacaatagctttcctgtttggtgacatgggaacagctgtaccatacaatacgtttctgcgaacgcaggatgaaagcatatcaaccatgaagtggatcctccgtgatgttgaagctctaggcgacacgccagcctttgtgtcgcacattggagacattagttatgcaagaggttattcctggttgtgggaccattttttcgcccagattgaacctgttgcctcccaagtggcataccatgtttgcattggcaatcatgagtatgactggcctttgcagccatggaaacctgattgggccagttatggaaaagatgggggtggtgagtgtggtgtgccttacagtttaaggtttaacatgcccggaaactcttcagaactcactggaaatgctgcagccccaccaactaggaatctttattactcatttgatatgggagcagtacactttgtgtatatttccacggagaccaattttgttcctgggagcaaacagtacgacttcttgaagcatgatttggaatcggttaacaggagcaagactccttttgtggtggtgcaagggcacaggcccatgtacactaccagccatgaaaatagggatgctgctttaagaggaaagatgcttgagcacttggaacctctgttggtgaataacaatgtgacacttgccctttggggtcatgttcatagatacgagagattttgtccactgaataacttcacttgtggtgttaatgcgggtcacaatgcaggggacaaaaaaggatatactgttcacattgtgatcggcatggcagggcaagactggcaacctgtctgggaaccaaggccagaccatcccgatgatccaatctttccacagccaaaatggtctctgtaccgcggaggcgagtttgggtacacaagactcgtcgctacaaagcagaagctcgtgctttcttatgtgggaaaccatgacggtgaggtgcatgatcagttggaaattctggcatctggggaagttgtcagtggtgacggaggctgtagtattgctgatgctaattctaaagctggaaatgtgattgtggaatccacattgtcttggtatgtcaagggaggaagtgtgctgctgcttggtgcattcatgggttacgtttttggttacgttacaagtgcaaggaagaagtctgaggtgccagagagcaattggactccggtgaagactgaggaaacttgaactgtagaggaaacttgaactgtatattacagttactgtttaccaaattttcaagtaggtcatgaaggttcacagaaaagaaaaacaagatggcatgaaggttttgaattgtgagatttccactcgtttttgtttgattaagacacctaagctgtcacctcatatacttgaggacttatctttgtatatatgcatttttttttcttgcttaattatttcttttaaggcatttcatataggaacttgtgttgttgtacattattcaaggtaatatgatctgttggatgagaccatacactattgtaacaaagaaaaaaaagtgttagatttgattgtactattgatacacaaactttgatgtcgcaataggaattacccaatttgatcattaaattttgtatgtcagtccttttttatacacaaacttagaagggagagatggttgttactcttcaaagtcaagcaaacctctggtttcaatgaacaaacaacattcttaaacgtaactcatcaatttttgaaattattctagattcaaattcgaatcatgtgtttattatgggccaatagcactgaaagtagaaatattacgtttcggtgcaagtggccatattcagacaagaaaccagcgtgctgtatcatatgcagacaaaaattgctaaaataatcaaattgtgtaaggcagaaacccagaaaatatctgaggggtgattcggtcatcaactagtttcatggacatgcagttcaatcatgattattcttgatcacgaaaggaaaaaggaggaccaaccaaccagtgtcacaaaaaaaggaatggggatagtgacaccccaatattttggctcgtgctcaaaatgagatattaaatgaagataagaagacaaacacaaagacacatacacacttcctctttcactcatttttcttttcttctcccttcacaagtcaaagcaacattacataaatattatttctgttctgtgtgttactatttcggtat

SEQ ID NO: 411 - DNA, 3272 bp, Glycine max
  source 1..3272: mol_type = genomic DNA
gttagaaggctctggataccatatttggatttgtgatcatgaataagataaaagagaataaagtgatttcattgataccatgaatgattacaagaggagtatttatacactgcaataataagggataaaactgatacactatattagcagtaacaaactgcaacaaacttaacaagagataaacctgatagactgtataagcaataacagaacgtaaaacaataactaactgtttgcttgacaattttcctttacaaaaactaaaagccaaaaacattatatttgcaaaagcgtggagcaaaattttcctaatgacaaataatgcctggccatgagtaaaacaagtgacaacaaacatttgggatttaaaagataaaaaagaaaaagagaaagaaagagtcaaagaataatgttgaaaacatttgtttagagtgactattggaaaaaattcaaatcacatatactaaagataaagtcatataagagtgtatatcaatgagaaataactttcatcccttgaactagtttttgaagttaagttaagcctaaactcacatctttaagactttaagatgatataaacctatatccaatattattcaaaaaggatcacccaccattattattcatgcactaggtccaagatcccacattagttagaccactcaccaatcacaaagcttaattgaataaaaaaattaatataatgggtcggggtagagctgagcataatccatctaacctccaattccatagtcaaagctggtctgcccttggaattgtatttggattttgaatacaatataatacattagatgaaacaatgttgttgttgttgctgttgtactcatctgactgagcttcgtggtcagtagctttgaataatactaataacaaaagaacacgatgcatggatgggatgggggtagagctcagcataacccacctacctccaaacaattattaatatgaagcaatgttgcactataaaaagaggtgcttcttggttatagtatttgtaatacaatggcggctgctattgaaatccccaaaatagtgtttccaaactcctctgcccaacaaagggtgcctgtgatcggaatgggatctgcccctgacttcacatgcaagaaagacactaaggaggctatcattgaggccgtgaaacagggttacagacacttcgacaccgctgctgcctatggctctgaacaggctctcggtgaagctctcaaggaagctatccaccttggcctagtcacccgccaagacctctttgtcacttccaagctttgggtcaccgaaaatcatcctcatcttgtcgttccagctttgcgcaaatcacttaagtaagaaacttcatttaaccccactttctttatcgccaaatcttacttattactcacttcatcaactttttggcatgcagaactcttcaacttgagtacttggacttatatctcatccactggcccctcagttctcagccagggaagttctcctttcctattgaggtagatgatctcttgcctttcgatgtgaagggtgtgtgggaatccatggaagagtgccagaaacttggcctcaccaaagccattggagtcagcaacttctctgtcaagaagcttcagaatctgctctctgttgctaccatccgtcccgtggtcgatcaagtaagtctctctctctgttgtattttgttttgtttatgtgaatgattaatgataagatgaattactactgttacaggtggagatgaaccttgcatggcaacagaagaagctaagagagttctgcaaagaaaatgggataatactaactgcgttctctccactgaggaaaggtgcgagcaagggcccaaatgaagtgatggagaatgatgtgctgaaagagattgcagaggcgcatgggaaatccatagcccaggtgagtctgagatggttgtacgaacaaggtgtgacatttgtgccaaagagctacgataaggagaggatgaaccagaatctgcagatctttgactgggcattgacagaagaagatcatcacaaaatagatgaaatatatcagagccgtttgatcagcggacccaccaagccccaagtcactgatctctgggatgatgaaatataaactaatgtgcctcgtgctctattttataatccatgtatgttaatttctttcttttcttttctttgccttcgtctacttgtttgatttgaggtttaaataattgatgccacttattttatgcaacacttgttttccccttttactcaaaacccatatgcattgactaatctttcgtcttcgatttgacgaggttattacttactttttatgggataaatcgtggatctcattcattactagcaatggaaaagacacgttaacagagtatgaatcatcaactttaatgaagcctgactaactaacaaaatcgtacgtcgcgtgtttgtagcaacaataaataatatgcgaaataagtccagacacaaattcggaaccacagacaatgaataaattaagaatgcgcggcataggacatgaataacctattcataaactcttgctattgatctaagaaagttggattctagtgacaaatgctcaggaagtcaaatttcttttaaccaattaaaagtaaataattagatgatagtgaaagatgattttatactaacattaagttaaatttatattaatctaaatatctatactctttcgtgcaagtttctgtggtaaatgcccaggcttcaaattttgcaataaggtatgatcaattattaaaatgagtggttcatcagctctactatttcaatattgttgtttgttaagaatcgagtccaccacatatttagacagattatttaaatttatttgttgaaataaataatattttgttttttaatgtattcatctaaattgctgctaaaaaaatcatttttgcttattttaaaaaacaaatcatatttacttcttaaaaaacacttatataaaaaaatacgtatttaaaaaattaaaattaaacaaactcacttataattttttttttcattcaacgcattaagctatatgttttctttaatgcattctcttaatgggtgaaattaaactgaaaaaaaccaataaaggcgcgagtgaaagagattgccaacaacatacaattttgttagttttatacacatacacgagccttcatttccttatttattttctctacataccacaaaaaaacaaaaacacgtgcatgcatgttcccactagctttttaa

SEQ ID NO: 412 - DNA, 8866 bp, Glycine max
  source 1..8866: mol_type = genomic DNA
ataaatgtttaaaaagtaaaaataaaaagttataagatgtagttagatagaagtattccaagtacatgaacatatactggaacatatcacactaatcctaccaatgcatgttggtgtgatcggataaaagtgtaaaaagtaaaaactctttatattgtcagtgaataatgtttactcattaaaaagtgttggtgttttaaataagaaatcaatgctcatacactgtcggtataaattgcatagcttatcagaataaatctctcctgaactgttttgtctatcaaattcttcctttgttgagcatttgaaacatggcaaacaacttccaacacttcaattccttcagcccggagattttcagccgccacatcaacattttgctttagcaattcaaccaaaaaggaaaaaaagaaaagaaatcagcaatgaacaaacatgtgtgcagagcacaagaatcacttgacaatcctgttaatggtagtaggtgggaatttggaaacagataaagcatttgtacgaactacgaatcaataataacaataagtcaaaaacaataatttcatcctaccgttacatgaatcacacacatcattagactcaattaaaaaccaaattcatgaaatcgcttttaatcatttcctccaccatgcttgttataccgaccacccttatatcatttaaaaattagtctctccttcataatatgaatcaaataaatgaaaagaagaaaaaaaaatccttaattcttgtaacccaaatacaaaaccaggatttttttttctaaaaccaaaagaaaaagatgaagactttgacctaaactccataagaaaagagattgaaaacaggaaattaattgaacctgtttgcgagaagagatgacaacagatgcaccctccaagccaagcctatgtgctatggcaaagccaattccctgagtggaagctgtcacaattgccactttcccttcaaatctcttacccaactcagataaagaaagaggctttatttgtgtctgagaaacgaccatttaaggagtttactctccaatgctaaggtgtggaagaaacacaactctgactagggatgagttatcaattttcaaaaaataacacacctcaccctttcaacaagttgcaggtgacaaatctcaaccatatattaaaaaattaatatatctaacagttaaaacgttagtagttagagtgagtggcatctatgttttttgttcccaagattccttttgaaaactactatgttctgtgaaatatcttccctcaaattaaaaccctcttgtttgctttcaacaaacaaattgatatttttgacaggtaggtgaactctaaccgcatctacttgttataaagctgcagttgcagttgcagttgcagttgcttttgaatattctataatttgccactttttctttgtttttttacttatgatttttaggtaagttggggaaaagataagtattatatactatatatgagatatttgatagagtgtaaccaagttttctggataactacatacataaggtgtggtgtaattaatctgagcacatatatggtgaaacagttactgaaatgggagaatccaagtttgtgtccttggcatttctactggtttgtttagtggtccaaagggtgtggtcacatggatatcatcctctttcaaaagttgctgttcataaggcaacagtatcacttcttgaccttgcttacatcaaagcatctccagcagttcttggactacaagtaagttttaacactgttgtgcaatgtaaattgatcagtggtgtcacatgtaaaccctcttgatgatcaccaatattttttatgtattagttttctacttgccatcttgttgcacattgcctgcttgttgctgatgtaagttttactggattctgtaggagcaaactgctgaatgggtaactctggagtacagttctccaattccatcaattgatgattggattggagtattctctcctgcaaactttaggtaacattcaaaatcagagcctatttgaagtttagccagaaaactggctccaaatttggagtcctatagaattttacttattgtttcaattaaattcttgtcttgtacaaccaaacttggttgcttagttttaattgatttttcctgttttgtgcatttcagtgcttccacatgtccaaaagaaaaccgtagagtctacccaccactattgtgttctgcacccattaaggtacatcggtggatgtgaacactaacctgtaccatattttcataatgagtttaccacaatgatttctttctgttgcttttcttagccaggagaagttatgaaagagagaatagaattgatggtctgatgaatgtttaccccattgtgcagtatcaatatgcaaattactcaagtcccctctacaaagaaactggaaaagggtttctgaagcttctgctgattaaccagagatcagatttctcatttgcactattttctggtggcttgtcaaacgtaagccaccattagtttgaacaagtggatgttaatattctatgattcttatacaaacaaaattgcatgcacagattatttggaagtagattagatccatgagaatattcttgcctttttactatttacttttaaacagtggatacaagttaacaaatccttttaaaggctactttgtgggctgagtgagaattatctctttttcagtttgtctttttcgttcacttctgttctgctttcctagcagttcatattttcctttagatactgtggaagccttagtcttacctccgcagattttgccattcataatcaatctatctatacatggatggttaggattagctcttcttatgctttcatctctcacctgatatgcttcctatataggctagttaaataatatgaacggaatgtaggaaagtttccgtctcattgttcaagaagtgaacggaatggtttggacactgctaaacagaaagttgttttcatccccaaattaggagtctcaaagcatattcatagaacaacaatcaaatacatgctcacagagaagttcatgttcacagacatttacacaaattcacgagctcacctgattttccacatttgcatacttgcattggatgacacacatttcttttggatttatgtatattttatatgataatcctttaattagtaatttcaatcacattgtctaacagtaacaatattttgcctctctaaaactcctaatttgcacatctatcatgaaatagctaaatgcaatctcttttttgtttctatttacatcatgacagccaaagctagtagcagtatcagataaaatagcttttgccaatccaaatgcaccgctttaccctcgcctggcactaggaaagtcatggaatgaggtaagttcattttctctagtcctagactgcataaaacttaaacagttgatattaaaaggataaggaagttccctatgtaagcaaatgctatgtgaacttgtgaagaaagaaagcatccagcatgctgctattatctctgagttaattttttaaaatttttttgcatttactcttgtttttttttttttttctttaaatggttcttgcattttatcaaattaaattaaattagtataattttgatcagatgactgtaacatggacaagtggatatgggatcaatgatgctgaaccttttgttcaatggggtccaaaagaaggggatcgtatgcattcacctgctgagacactgactttcactcgtgatagcatgtgtggtaagggaacttctttgatatgtacttgaacctaggatttggaatcaacaatggtagtacaacataattaagagattatacagttttcgatatatgaatattcatggtaaaaacgatttttttttataaaaaaaaggcagaaaagtgttggagaataatttatataaagtatgttattaaataaaatgtgtcatactttctagtgtaccaactatcaatctaaaaccatattttcttgtttccaaattgttcttgtcaagaactaattcatccctagatcttaaattgttaggtgcaaataaggctttctccacaaaatgtcttgtcacacaaaccctttaggtttggcttaaggtgtatacaaagcactagccaactttaggtttgatgtgcacataaagtgtttaagcttcatatccttttacaaagtgcttagtccaccattgggaacatcagtaatcttgaaagtttagtttggtggaaaaaaaataaaaaaatgttgctcattattgcacattaacattatctatttatgaacaggtgcaccagcaagaacagtgggatggcgtgaccctggatacatacacaccagtcatctgaaagaactgtggcccaacaaaatgtatgttattctagcttaggcctagttttatgcacattttaatcttatgcttccctttcaaggtatacgccatattcatgaatcttatattcagattttgttttctttatagtagattagcttttcattaattttgtgagaacttcactctaaaggcataaacttaattgatattgctatctattatgagccaacatcaatcaaatttattatttaggttaaatttgattttttaatttttttttcaatttaatcctttaatttttaaaatagattcaatttggttctttaattttatacgtttaattttgttttctaatttttaaaatcgatttatttttttggaaaatttgattttgtagcggtttaaaatcacttagtgacagttttgaacagctacaaagtataatttcttaccatttagattaaaagaccaaattgaattgatttaaaaaaattagaggaccaaatcaaacaaaaaaaaactacaggatcaaattaaatctaaaaataaattaggagattaaataactaatttaacttttttttattgtcattatatgctactatatagatatcatctagattttaaaccttcactaccaatagaaaaataacaactataaatttgctattgagctcctaactaggaaaaacctattgagttgcatcatattttctatttaaattagtttgctataatgctgcatgataatttaattgtgccttctgttgattggacagatatgagtacaggataggacacaaattaaacaatgttacatatatctggagtggaaactatcagttcaccgcacctccttttcctggacaaaagtccttacaacgtgtagtcatatttggagatatgggaaaggtttgaactgttatgaaaaagtatgcatgcatatattcaatggatggcatctgccatgtttctcagtaacgttggtcctaatatatgctgataatttgaaatttaaaattgtgatatgctcctcatacccggagcatattatatcaaatttatctttcttggcctttctaaattatagtatacggtatcaaaccaaagaatatgctatagaatgaatcttcatagataagagttctttccttactatttctttaagaagctgtcattgttaagcgtataagtgttaacaaactgcatattaagcgtataattgttaaccatacaatagtttcagttggggccacatcagtcacatttgtccataacttcccacaatatcaagaatcatgatgacactgcaaaagcgaccacaatttaaaaccttgtttgagatcctattgtcctcaagtgtgaaccacaatccttttatgatttgaattctctaagtatttgataatatttaaccatgcagggggaagttgatggttccaatgaatacaacaatttccagcatggctcaattaacactactcagcagcttatccaggacttggaaaacattgacattgttttccatattggagatatatgttatgcaaatggataccttcctcagtgggaccaattcacagcacaggtggagccaattgcatcagctgtgccttacatgatcgcaaggtttttatatagcttaccccaaaaattagactaggaagtgttttgtttatttatttatttttaataatgattcccttgtggtgattttgtcctttacagtgggaaccatgagcgagattggcctggaacaggatccttttatgagaacatggattctgggggagaatgtggtgtgttggcacagactatgttctacacccctgcttctaacagggctaagctttggtatggcgacatgacttcatacatttcttcaaattataatcaataaattagcgaattgttagatttttcccgtttagaaaggttatcttcttttgggtttaatgatttgagcatgaagaaagtgaatcaccaagaattacaaatgccattcaataaagagtaaataatcaaattgaggctttgaaataattttataccaaagtccaccaatgcttttggtattaaagctttaggtagaaaatactcaacagaattaatcaggtatttggaaaatgttacgtttctacactctttcaccaggtattcaattgactatggcatgttccgcttctgtattgctgacactgaacatgattggagagaaggcacagaacaatacaagttcattgagcattgtttggcatcagttgacagacaaaaacagccatggataattttccttgcacatcgcgtacttggatattcttcttgtatctgttatgcagaagagggatcatttgctgaaccaatggggagagagagttttcaaaagctctggcagaaatacaaggtggacattgccatctatggccatgtgcacaattatgagaggacatgccccatatatcaggtttcttaaaccttgtgctcttcttccattcaaattttgatgaatataaggctaacatgtacaataagtcaataacaacacaacatccagaattaagcattaagtaatcaagatgtcgagttccctaatccctaatatgctcttcttgagaaaaatgaaacaataccattttacatgccacaaatagcatcatttaaacctgcaagagttggaatgagaatgcatattttctcgactaagaacctttttttacattttgcaacagaatatctgcactaatgaagagaaacaccactataagggaagaaccttaaatgggaccatacatgttgtagctggtggtggtggagcaagcctttcagcatttacttccctcaaaaccaaatggagcatctttaaagactatgactatgggtttgtaaaactaactgcttttgatcattcaaatttgttgtttgagtacaagaagagcagagatggaaaggtttatgactccttcaaaatatcacgggattatagagacatcttggcctgcaccatggatagttgcccaagtataacaatggcatcttgattgatgaaatgatgaaagcttcaatgtatccagccgtgttgaagcagtgagttatgagtagacttagatgttgtatgcggcagcaagctgtcaccttgttcaacatggcttaggtagaatgcacactcaatttaagctgcgagcactttcttgtacctaaaatagaataggagggcaaaatacaatgctatacaagcaattccagtaattaccaaaacccaatggaatcccgatggatagtcaaaaactgtggtttcaaagttcattccaaatactcctgctacagcagcaaatactgcagctaccaatgtagctgctgtaagaagcaactcaaactgtattagctggttttgaatatttccctgtaatagatagagtgaaaagtaacgctgcctggtttacacagtttagagtatcaaagaaataaaggaatagacagagaatgttgcaaattattaatcttagcataccaattttatgttgataaaatcttctgtgtcgtcaatgtattctttgagctgcattaccagaaggaaaaaaatcaatacttagcatttgcatgaagcaccatgcctaaataataaaatcatacgctgttagcttacataaaaagtcactatggggactactcattagcaaaaatcagaatgtaacagctgattggctgaaggcatgcctgagctaatttaatgttatatatgtacaccttagttatattagcaaaaactatgatatccaacatacaaatactctgttatatgttataagcaacatgggtagattctaatgctacagctgagtaagtcaaatttctcataccgacaatatcgtgttaagagtattatcaatgacaataaaatatgcttcaagcaacatttccagtggctcaatcctttccccattatcagacgaacccattgaactaccatgtttactagaatttccaatgctgctgaaagccctttgcaacatctggactccactaattgttcgctctggtgaagcaggagccgactttgaaattagtctacctgatgcacgagtttgaaaacaatcattaaaagtgcaagtatccgatcttctctttttctcagttaggcacatctcagccatgtcaccatcatcatccatgagatgttctatttcatcacgaacctgggaattaagaataagttactagttgcaggtaatagaaagctagaaaaatgagaatagtaatcaagaataataattctacgttgatcaaccttctgaactcgttgagtcaaagcaagcaagtgacctttaaatcttcgaacacgttccagatttagagtactgatagatgaggctagttcatccagcacaggatatatttccatttccagttcatttacctatcaaatcaacattcttcttaatatacgggattcaagatgaaaatttacttacacatggctggaagcttctccaatgtctt

SEQ ID NO: 413 - DNA, 5418 bp, Glycine max
  source 1..5418: mol_type = genomic DNA
agttccaagaagctaaccttgagtttatttgctcctcaatgtgattgaagtcagctctctgaattgcttcatgcacaatcttcaacttcgtgtttttttagttaccatatgaatctcccaatttatttagattgtacaataaattgagaaaactcaaataattaaatccaataattttttcttaaaaatcatttcaatctaattcactgtgaacacctttatctaaaattttacatgaaatttcaaatttaattcaattcttactaacataataatgctggatattttcttaattccaaataatactattaaatattagattcaatgtttataatatattccacaattgtattttttttatttgtaagaattaaaaataaatatcaaaaagtttacaacactcacatatcctaaccaatcaattgagttaaattccttatatagggattgtatgaattttcattttaatacatatatttaaaatcttattattgcaaaaaataataatctaatacttttttttaaaatacatgaatgtatgaccatgaaaaatggcaccatgttaaaaaaaactgttttaaatatgaatattttctctcataattaatattttttctatgcagtattgtttaaaaaaaaaaactgtttcttcaatttctgaaacaccgaaaaagagagaaagaaaaaattattgttttttaatttaatatggtgtgcttactcacaaagcagtcttacactaatctcgaaataaacttatcagatggtcgaaaatcctttggcacgttaaaacacgtcgtacaaaagatgcagctgatctgattctccacttgtctcaagcagacatcacactgatcacaggtggaaaccaaatttgcctaagttccaaggcctcggtgtgactcagccccaagtgacgccaaccaaacgcgtcctaactaaggtgtagaagaaacagatagtatataagtataccatataagaggagagtgagtggagaagcacttctccttttttttttctctgttgaaattgaaagtgttttccgggaaataaataaaataaattaaaatcttacacactctaggtaggtacttctaatttaatccacactttgactctatatatgttttaaaaataattataatgcgtacttactttctcattatactaaatttaacatcgatgattttattttctgtttctcttctttccacctacatacatcccaaaatttagggtgcaattttaagtttattaacacatgtttttagctgcatgctgcctttgtgtgtgctcaccaaattgcattcttctctttatatgttgtatttgaattttcacaccatatgtaaacaagattacgtacgtgtccatgatcaaatacaaatgctgtcttatactggcaatttgataaacagccgtccattttttctttttctctttaactatatatgctctagaatctctgaagattcctctgccatcgaatttctttcttggtaacaacgtcgtcgttatgttattattttattctatttttattttatcatatatatttcttattttgttcgaagtatgtcatattttgatcgtgacaattagattgtcatgtaggagtaggaatatcactttaaaacattgattagtctgtaggcaatattgtcttctttttcctcctttattaatatattttgtcgaagttttaccacaaggttgattcgctttttttgtccctttctcttgttctttttacctcaggtattttagtctttcatggattataagatcactgagaagtgtatgcatgtaatactaagcaccatagctgttctgcttgaatttatttgtgtgtaaattgtaatgtttcagcgttggctttccctgtagctgctacaatggtactgtatatctattttttgcattgttttcattttttcttttacttaatcttcattgctttgaaattaataaaacaatataatatagtttgaactttgaactattgcctattcatgtaattaacttattcactgactcttattgtttttctggtagaattcattttaaattgaaggataaattaagaggcaatacttgtaaattgacctgtcataattacacaggaccctgttttgtgcctttttgtctctgtctttggttttgcatgttagcctcacacagatatttagtagttgttctgcatacaagcctcacacgtatactaaaccagtggacctcaaagtcatggccttacacctattgcatgcgagtctgtgacacaacccctggtttccatattgcaatgtgctacgccgtcgtccttgtttgtttccatatgtatattgataccatcaaattattatatcatttatatggtctggaccattacgtgtactctttatgacatgtaattgagttttttaattaaaaaaatcaatgaaatttaactacgtagcatcatatagagataattgactagaaatttgatgacttattctttcctaatcatattttcttgtattgatagccccgctgtcccttttaaactcccgagagagtataaaactgcatcgaatattacaagatgcactcttgtcaaatgaagggggggaaatgatactacaagccactaggcatggtatgatgctaaattaaattgtgcctgcaccccaggatatttcatgtgggattcatcatttattgaggaaaactctccaaattgaatcgtgcatttatatttttttttccatttctagatttcttgaaggcttatggtataggcacctacaattatcagcacttctctctattgataaacaattggctgtaataccacagtagagaacgatcacaacattttgtgctggttactttttgttttatggtcatgatttcactctctctaatctgtcacttccctccattcattttgtacttctcatatttttcacttcctggttgaaaattgtagttctcttggtacatactagtattagacattcagcaacaacaactgaactgaacttctttatactttgacacagggtctagcaaaggaaacaataatgggaggtggaggccgtgtggccaaagttgaaattcagcagaagaagcctctctcaagggttccaaacacaaagccaccattcactgttggccaactcaagaaagccattccaccgcactgctttcagcgttccctcctcacttcattgtcctatgttgtttatgacctttcattggctttcattttctacattgccaccacctacttccacctcctccctcaccccttttccctcattgcatggccaatctattgggttctccaaggttgcattcttactggcgtgtgggtgattgctcacgagtgtggtcaccatgccttcagcaagtacccatgggttgatgatgttatgggtttgaccgttcactcagcacttttagtcccttatttctcatggaaaataagccatcgccgccaccactccaacacgggttcccttgaccgtgatgaagtgtttgtcccaaaaccaaaatccaaagttgcatggtacaccaagtacctgaacaaccctctaggaagggctgcttctcttctcatcacactcacaatagggtggcctttgtatttagccttcaatgtctctggcagaccctatgatggttttgctagccactaccacccttatgctcccatatattcaaatcgtgagaggcttttgatctatgtctctgatgttgctttgttttctgtgacttacttgctctaccgtgttgcaactatgaaagggttggtttggctgctatgtgtttatggggtgccattgctcattgtgaacggttttcttgtgaccatcacatatctgcagcacacacactatgccttgcctcactatgattcatcagaatgggattggctgaggggtgctttggcaactatggacagagattatggaattctgaacaaggtgtttcaccacataactgatactcatgtggctcaccatcttttctctacaatgccacattaccatgcaacggaggcaaccaatgcaatgaagccaatattgggtgagtactaccgatttgatgacacaccattttacaaggcactgtggagagaagcaagagagtgcctctatgtggagccagatgaaggaacatccgagaagggcgtgtattggtacaggaacaagtattgatgaaccaagcaatgggccatagtgggagttatggaagttttgtcacttatcacttaattagtagaatgttataaataagtggatttgccgcgtaatgacttgtgtgcattgtgaaacagcttgtagcgatccatggctataatgtaaaaatatgtggaaagtgttctgcttataactttcttccttaaatgcacactccatagaacaatattattggtactaattttaatctgaattgaggatgttaactggtaggtgaggccaactttaaccctactactgtcgttttacaaggttattaaaatcgatttgatgttattaaatttgaaatagtcgccatttaaaaataaaaaaatatagaagacaattaaattggattggtttttagattcaaatttaaaaattaatctaaactaaactaaaattttataataacatgtcttataatgtattaagtttttattattgttattgagtttggaagcatataataaggaacataagttaatatttatgatccaataagatcgacttagtattagaatatttagatgatttgtatgagatattcaaacttcattcttatcatagagagacaaaagttaatattgattgtggagcaaaaaatgttattgggagcatatgcaaagataagatggataaaatatgctgcagcctgcagagcaagtgttttgtcaagtgacaactattcatgatgtgaacacaagaatcctttctatttatctatcccacataaaatacttattttaataatggtggtaaataatgattaaaatatttgattattggttaaaataaataaggaaaatataaacattctcatggaaagtttttgttaaagaatttgccaaatattgattaaaatatttgattcttggttaggaaaaatcagcaatgcctaagaatatttttttccaaaccttgtagagtaccaaacacaatctaagaatttttcaaatctatacgtgttcagaaactttctgattaatttaactggaggtaattatacttttatcaaatttttagtctttgaaacttttttttcttaattaagttactgaattttttttaattacatctctcatctaacatttgtatgaaaaattaaccgcaaagatctcatgagaggtgaagatacaaaactggtgcctttagaatttgttatatgcacaaatatttgtaaagtttc

SEQ ID NO: 414 - DNA, 3771 bp, Glycine max
  source 1..3771: mol_type = genomic DNA
tgctttcaaaattgctttttatgtgacacgttgcgttaaaagtactcttatactacgtacgtagtacgtacatcattgaaatattgaaaataattttacctaacattttcaatttttaataattaggtgtgttttgagattgtttggcacctaaccattacatgtgtcataacatagatatagatggcgatttacaattatttttaaatataatatttttttatcttaaattagagataataagataaataagtattttttaacacattaaattagagattaatttttgttatgatatgtgattgtcatccgtccaagaaaattttatacacttaaaaaaaatcaaataagaatttgttattaaatatatcattttttttccacatgtaaacaaatcaatatcaatagtatgagttgaataaatcaagttaaattgggttttcaagttcttggagtcaatctataggtccagaaactcgagaagggtcatataccaatttcgagaatactaatccccatctcaaaaatatagaaggactaacaggtaatatgaaaaatattaaacctataataggcagtcatatgtaccaggaaccatgatgctccaacaggtaacaagtgaaagtaataaaccaccgacatgttagttaacaaaaatttaaaaccaagagttaatcctcaagcatgattctttctacttttctacgattctaaacggcagcataaagacgccaaaaatctccagctctggcccttgggccccttctctagcaacattattgttcaaccttaataatgttataatttattattattaggtatttactattaattgacgtacaagactgaaacgcgtagccaaattttgtgactcggaaaggataaacgaaggaagttgggccaatgaaatttgtttggcagtttctcacctaaagagagatgggtgtggacgtatcgtttggccttataaggagtgactcagctataataaggagtcaccaatagcattcacaactcacatgcctacttagtttatttttttgtgtgtgtttatgaagagagagaagaagtgaagataagcacaaggagtgtcatctagtcagctactaccaaattttcagagtggactattcttcctttattatattcttaattaccgtgccttatccgaccctctcataccaaacccaacccaacccaaccaactatatttcaaccagccgcggcgactaaacaacgaccacaccctcaaaaccatttccaactaccaactactctctctatcactctcccatggcttcctcttccctctttctctcactctctctcaccctttgccttgtttcctctctctgctatgctcacaaatcttccttaaccctacctgtgacaaaagacgattcaacccaccaatacctaacaaccctctcttatggcacccctgttgagtctgcaaaattcgtgcttgatctcggaggctcaatcctctgggctgactgtgcatccagaaccaccccatcttccacccttgccccaatcttccaccgttcaattcgctgcctcacggcaaagggtcctgaaattgagacacatagatggctctcgagtctcgcaaatcccatagatcaagatcagccgtgtcaaattcctgcagagaacagcatctcggggaaaagggtcaccgaaggagagcttgtggaagacttagtgattaatcgctctcacgagcttctcttcacttgctcacccactcttctcttgaacggtttagctaccggtgccaaaggcatggtaggtcttgatcgatctcgcacttctttttcgtctcaggtttttcactcacttggaactcagagaaaaatcactctttgtctctcttcctcttctgggattgttcaatttgggaatgtggcgcatgaatcccaacccgggtctgaaattttcagatctcttacttttacaccccttgtcgcgaaccaagaccaaacacagacacacccttccatcaacgttaactccgtcaaaatcaacggcaaaaaggtttctttcgacacccccttgggtgggggtgctcagctgagcacggtggtgccttacaccactctccaaacctcgatctatgcaaacttcgaaagcgcttatttgaaagccgcttcgtctatgagcatgaaaagggtcgatccagtttccccctttgggctctgcttcgaatccaacggcgttggaagctcccaagtggggcccaacgtgccggtcattgatctggtcctgcagagcgagatggtgaagtggagcatacacggaagaaactccatggtgcaggtgaacgacgatgttatgtgcttagggtttgttgatggaggtgagaatccgaggaaccctattgtgattggagggtatcaattggaggatgtgttggtgcagattgattttgatacttccatggtgggattcagtccttcgcttctgacgaagcatgctacttgctctcatttcaaaccctagttttcggtgaatcgtgatgattatagtttattattatccataccacatagtttttctttagattaagaagagttttgaggagtttaacacgttctgtaataacccttttattttttttttctttcttttttgctctcctgcggtattatctgtataaactgcttaagtggcctatgttaaatggcgatggcatttttgatggcatttttatttgaaattgaaatacttctccagtaaggaaaatttggttgagttatgacttgtgacttgtgagtattgccccatttgatgtaagcatatgattgactgattttgtttttgtttaattttaattggtgggtgtgattgataagaaacgcattttattgtggaatgatcatagtgggaaaagcatatccgtttataagggacggtaaagatacaagatacaaatacagctcatagcacacagtttttctcccgaaacaaacaaaagatgtggcgcacagaatatctttttattccttcaagatgctctctagcgatacataaattaattacccatacttttattttttcccccataaaatgaagcttctggactatttttcttcgctgctatagtcaattcaaataatcttaagaatgcaagtcttcaaagtacagcgactcataatctgtggcatgggcttttgtatatattttaagcttattgcgcttcataattcaaatttcaattataaaatccataaaaaaacaatttttttttttatgtatgacgtcggactataattaagtgcatcatcactctcaatttttttgtttgagaatatgcatcactcttgtattaataatcctaagtttgaaaaaatttgacgcgaaacaaaaattagtggacgcttgcgttggtaaacgctatcaaagtcgctccttttaacagtgacttgtccccatcccttgtcagtcacattattagaaagagaggtttaaggattttgtttacatgaataaaaatttatgacatagacatataatgaaaattaaattttaaaaagatagagattaacttaaaaaatgatcacaaagacaaaaatatttattcactcaaagaaaatttaacattatgaaactggtgaatccgtatttctttatgttgccagagttctcttcctccaactaggcaacactgcagcatcactgtatgcttattaatcttatgagatgtactataatttgcaaataagttccagatagtttattgttcgccattaatgttagaattaagga

SEQ ID NO: 415 - DNA, 3584 bp, Glycine max
  source 1..3584: mol_type = genomic DNA
tgcaaaaacgatcggccacaaataattgtcatcacgcacttggttgcagaaagtatgcataaaggaaacacttacttggcatggggaaatcaccattttgttatttattgtaggttgcagaaagcatgcataacgaaaacacttgcatggagcttgggaattagtgatatgttacacaaataagaacgatgccatcgaaaggtttaacaaaaccgtcacctcttaaaaatttcaaaagagaaagcaaaagcaaaaaaacccaaaagtaattattaatttcttcaaatatatagtaattcaaaagattgcatagagtcataggcctttttttcctgaatttaatttatagctccacctgctattcaatagtttgcaaataattttgaaaaagaatataactgacttaaaaaattctttatacttatttaattttttggattgcctaattaacgctttgtttgatatgaagttttagtgaaagaatgaaaaaaaagttcttcgttatagttataaaaaaatgagaaccaaatatcctaattaaaatagttataaaaaaacgtatgagaataaaaagtattctttatagtattaatatatatatccgaagttttatatcaaaataaatcaattaatgtccaaaaagtatgcaaatgaatttggtctagttttaaaatccatgcacatgcagtaagtaaagttgttggatgaccaaacacagttcaaattaatatatgcttgtaaatctaatttgcgagaataaaatttatgatcatcctatatttcattcaacaatttaatccaaatcccaaaatatcatacggaagaattggtggacaactggacatgtttgagttagacattgaattaattcaatcgccatctttgacagtgacacgcgttaacttgcaaatctgtgtgctcaacttgttgaagctcatccatttgaagaagcaaagtccaagtgcctaacttgagaaacctatataagtaggtcccaatccctctctatattattcacatcattaacacgtttcctttttatctctatctttcttcacatcttaaccttgttcttaccagatggctgcctcagttaaactcttatttttgtcctttctctcgttgttcatctctttctccatagctcaaacctctttcagaccaaaggcacttgttcttcctgtaaccaaagatgtttctgcctcagttcctcagtatgtcacacaaatcaaacaaagaaccccacttgtggcagtgaaactaactgttgatcttggtggtggctacttgtgggtgaattgtgaaaagggctatgtctcatccacctctagaccagcccgttgtggctctgctcagtgctcgcttttcgggttatatggttgcagtactgaggacaaaatttgtggccgttctccaagcaacactgtgactggtgtctccacatatggtgacattcatgcagatgttgttgctgtcaattccactgatggaaacaatcctactaaggtggtttctgtgcctaaattcctcttcatatgtggatcaaatgttgtccaaaaaggccttgctagtggtgtcacaggtatggctggtcttggcagaactaaagtttctcttccttctcaatttgcctcagctttcagctttcatagaaaatttgccatttgcttgagttcttctactatgacaaatggtgtaatgttctttggtgatggcccttacaattttggttatttgaactcggatctctccaaggttctaactttcacccctctcatttcaaaccctgttagcactgctccaagttatttccaaggggagccctcagtggaatactttattggggtgaaatctattaaagtctcagacaaaaatgtagcattgaacacaaccctgttgtctatcgatagaaatggcattggagggactaagattagtactgttaatccatatactgtcatggagaccacaatttacaaagctgtgtctgaggtctttgtaaaagaggtgggagcccctacagttgcacctgtggctccatttgggacttgctttgcaaccaaagacattgggtctacaagaatgggtccagctgttcctggcatagatctagtgttgcagaatgatgtggtgtggaccatcattggtgccaattcaatggtgtatgttaatgatgtaatttgcttgggttttgtggatgctggatcaagcccaagcgtggcccaagttggatttgtggcgggtggttctcatccaaggacttcaatcacaattggagcacatcaattggagaacaacttgctacaatttgatttggcaacctcaaggcttggcttccgctctatctttttcgatcacagcaactgtgccaactttaactttacctcttctgcttagaatttgatattattctactatattcaaaacttgtatcttaattaagaccaatgtgtgtagacgaggagatgaataagtgaggttatatttatgcataacctccatagtcttgttcccttttgtctacaaaataaagagcacatggaggacgtattcatcttacatcttgaattactccattatccgacatggttaccattgttataaaatgtgatgtgtgatagacgatgctcgtataaataagaggcttctctcccagtagataggtacacgtacggctcatcgtttatccttattccttaaccccaactgaattacgactagcatctctacctatggtaagaaaatagatacaaaaatcatagtttgttggttactgatcagtttttatagcccgaattccctcacccaaatcactttaaacaaatcttcattgacacgttatagataccacaccattgctttgcaccctatgtagttaattatttcaaccacatttactgggcctggaagaattaatttcttaacatgaatccaaaagaggtggcaatatatctttatcacatttgttttgaaacttatttcctactagccaactgttggatacaagttacaatgtgtaagtgtgtgatttgaagtgaggaaaatctcccgttggaagaatttgagggaaaaaatggtgattgataatcttcaatgggaaaaaagtacgaactagcttttggattatgtttagtccaatctagatcatagcacactcctagccacacaaaagtaaaaaataactcaatagattgagtatgaaatgttaagaaatctcacattgtctgtctcaattcttggtgtacaatttatatatttgttaagaaaattaaaaagccaattaattttaagctaaaatctaatatgatatcaaagtcaataactcatcttggttcttgcttattctagtagactcgtatatgtggagggagatgttaggaaggcctacatcattttttcgttactctagatttatgttaggtaggcctatatctctacctccttgattttgttctaaaggattctatgacagaataattttgttccgtatttcatggtttgctaaggtataatacaagagagttacaataaaatctcctaagattaagttatacataatgattctccaaataaaactcctaaaa

SEQ ID NO: 416 - DNA, 7843 bp, Glycine max; identical to SEQ ID NO: 293
  source 1..7843: mol_type = genomic DNA

SEQ ID NO: 417 - DNA, 7676 bp, Glycine max
  source 1..7676: mol_type = genomic DNA
gtataaaaaaatttgataaatttagatgaaacaaatttacctgatttttttttttttgcagcaagattcaagacactgttagcttgcttaagtagaattagcttcaccttgctgataaaaaaaaaaaaatagtttcaccttgtattttgctaatgtcactgccaattaattacatggcccccattgtttttatttgacactcttgcattcattcaatgagattttcgagcattacacttttcatttctcatttgctgtttttttttaagaattattttatgaaatttcaatctttaaaactttaatttggatgaagatagttttttataataataaaactgaataatagaatatccattatagttatatctggttgtttgaatgaatatcgtatttcatgttacaagaaagctaatgtgatatagttgcgatgattaaaattctaaaattcattaagaaaatgtgaatattatcttccagatttaaataattttaaaaaatgtctataccaaaaaaactaatgttaaaaaattcaaaagatattatgaaaattctattcttatttcacgagtgatttaaaaatatatgcaactcaaatattcaatttctattttgattatgtatattaaattattaattaatcaaaatgaacttcccaaagcttgcaaatagattttcaaaattttatttctaaaatatgtaacaaattgactttctaaaattcaaatttaaaaatacaaatagatttttaaacgtttgtttatgagatgtatcataaataaacttttgaaatatacaaataaattttcaaaagtttagttgaaaatatatgacaaataaacttttgaaaattttattttgagatatacaaatagatttgtagaatttaaattttgaaacaataaaactaaactcgtatatagtaacactattgaaataaaatttaaaatttaaaaataaaaataaataagaagatgcagaaagcaattagggcaacttaacacaaacgaggtacagccaaaatagaaaaaacatcatctctttcgggacttccgtcatcgttgactatactttggtaactctgcattctgcaataataagttaagacccacaaatttcttactcgctgtattgccgaagcatgtgatagttgagtgataaacacaactgtgaagaaaagtcaaattggaatgattctttcttatgcatattgataccttatttattcaatctcttgtgaatttgactaatagtagcatatgaagatgaagatagaagaacgtgttaacatgaatctggttctggtagtggcctggttggtccagttgaacattgtttatggctttgctcacattcatggttttggagagcaaccactctccaggattgccatccacaaggctgttgtttcactccacagtagcgcttccatcacagccaccccttctcttcttggcacaaaggtagcaaacataacataacatgttccttaaactttcctaatttaaccagaggagtgctaacaacacactcttttgtatacactcatacactcgttaaataagaagtaatacccaccaaattttgtgattttcaatatatatccgtcaatagtgaaacaggtgtttaaaagagtctgttagaggagaaattattacatggtctcagactaccaccagaatgctatagtctcgatcaatctccacgttatatgtaattgagtatttcaatttatgaaagagttaacaagacatgattaagtgttaggtagagattgaccggaactatagaaccatttaataatttttcgcgtcaaagagtttgttacactctatgttggaccatgccatagttcttacaaattaaataattggatttgttttttgcgaacggttagtcttgatagtttggttgaatgtaaaactttcaaccattgaattgtgctttgatgtgtatgatttcagggtgaggatacacaatgggtgacagtagatattgattaccctgacccatctgcagatgattgggttggagttttctctcctgcaaagttcaagtaataattacacatctctttctcaaaatggacatatattgaatattgcaaagttagaactcaactctgtacctagcagtaatcttcaataactgaaattttcaaatctagttgtttccaaagcctgcatctaattattgctaaaagaactaagtgaaagtcttttttataaatggcagtgcatcaacctgtccacctgtgaatgatccaaaagaagtgattccatacatatgctcagccccaattaaggtatgtgtcataaatctctgattgaattaaagggcaggttggattatttttctaagtgatgcattactcatgtaacttgtttgaaactttgtaccagtacaagtttatgaattactccaactcatactatacgaagacaggaaaagcttctttgaagttccagttgatcaatcaacgtgcagatttctcctttgcgctattttcaggcggactgttaaatgtgcttccagactctttctgctgttcttatatttagtatctccttctcatgctaactaaagcatgctcatgttaattgactctcaccttatatgtagcattgcagccactattttacactaatgcacttaatagggaaaccagcctatcttcattcagactttgtatataatttgtgggctgacttatggtcttctgattgaacactacagcctaagcttgtggcagtttccaatttcatatcatttgtcaatcctaaagtgcctctatatccaagacttgctcagggaaagtcttgggatgaagtaagtttatcttcatgctttgaggttcttgatatttttcccacccaagtaataagattcattacttctatttctcctataatggcttttcttcagcaatgcagttgctatatatgaagcatcaagttaacaagtatcctatatagaattaatagattttgagcacaaccctccaatgatgatagtgttctaacaagatatcattagattttataagtttgacacgataccattagattttattagtttgacattatgtcattattagattttataagtttgacttgatacttcggaactaggaattgatgctattttgttttaacactctgaaaccactattaggactacagaagtgattttaggatttttcggcctgtcttatgcagatgacagttacttggactagtggatatgacataaatgaagctacaccctttgttgagtggggtcctaagggcaaaacgcaagtgcaatctcctgctggaacattgacattcggtcgtaacagcatgtgtggtatggtttatttggtcataatgccatctcacaacaatgggtttttattgcatacagggtctgatccagttaatattttttagaaaacctgaatgttaaattgaatctctgcttagcattctgtaaattgtatgaaccctgactaggaatcatcataagcattaattactttaaaactgaataaactggaatcacttggtttatttacatcttccccttctataatgttccccataatgtgtcatcagaatatatcaaggagaacaaacttcatttcttgaaaattataccagagtagcatcttatgaaatggagggtgggagggtacaaaataacgaactgaaaatctaagttttagtagaagtagctttcagtaaccagaagtccataaccagtaatggctttcctgtttaaattgccatcaaatctcgttttcatcttttctatagaatttgcaacatttcattgcaagttattgcattcttttgcagctggaagtaagtaaatgttggaaactcttattgctgcttttttattcttttgaaaaattgggagtaggcttttctatagcagcataatgtggttcttttgttactctcccttgcaggttcacctgcacgaactgttggttggcgtgaccctggtttcatacacacaagttttctcaaaaacctttggccaaatttagtgtatgcattcaaatattcatttctgtttataacacaatgcggatctggcaaagtttgttctatattttttattaaaaatatttttcaggtatacatatcaattagggcatctattgtctaatggttcttatatttggagcaagaaatattcattcaagtcatcaccatatcctggacaggactcattgcaacgtgttatcatatttggtgacatggggaaggtaatgttaattttcaaaataaaattcatatgaagaaagaagaccctctgaaactgtctttgggaggaagaacctagtatgcaaaaactaagcatggtctgtaaaattcttattgtacacgttagactacatagctgcaaaagtacaatacaaaccgagcacaattgttgataatttggaataatagtcaggttaaaaatgatgaagtcgcaagatgactgttgagcatgattattgataaaagcacttacttttctttcattttgtttcaggccgaacgtgatggttcaaatgagtataatgcctatcaacctggttcacttaacaccactgaccagctcatcaaggatttagaaaatattgacattgttttccacataggagatattacttatgcaaatggatacctctcgcagtgggaccaattcacagctcaagtggaaccaattgcatcaacagtgccatatatgattgccaggtttgtcctattgtcctcaccttatgttgccatgtaaattagattcatgtattacatatatattgaacaataattgtctaataatcatgcagtggtaatcatgaacgtgattggcccaacacaggatccttttatagcactacagattcaggtggtgaatgcggagttttggcgcagaacatgttttttgttccagctgaaaacagagcaaacttttggtaaactcagattcatgaaaaatttaaatttgaccatttaattatatgtatgtttggattacatcaaatttgagggataatcttttttcccccatcaaaagatctgttaaaattatactgattacccatttcaaacacaatatgaactaatccaaaacaaacactcttaaatttgaagtttacaaatagttataagaatgatgctacacataaaacttcgtaccccattgcccagaggctcttcgctatgcgaaggtatgggggagggatgttgtacgcagccttacccttgcatatgcaaagaggctgtttccggattcgaacccatgaccaacaagtcaccaagacacaactttaccgctgcaccaggactcgccctcaagaatggtgctacacatatcaccacaaaattatttaaattttaaattcatgtttggcttttgttacaaaggtggtataaagttgagttaatttaaactcagtgagagtttttttataaaatgtcttgtgacataaaaatgttttagtattctaaatgaataattcctggttatatacaaaaatgtgtgtcaataattctaatgatatatagtaatatatttttcatatttgatatataataaacgagattctggatatccaggtatgcaatggattatggcatgtttcgcttctgcatagctgacactgaacatgattggagggaaggatctgaacaatacaaattcattgagcattgtcttgcaacagtagacagacagaaacaaccctggttgatttttgctgctcaccgtgtgcttggatattcctctgatttttggtatggtgtggagggttcatttgaagagccaatgggaagagagagtttgcagagactttggcagaaatataaagtagatattgcattttatggccatgtccataactacgaaaggacatgccccatttatcaggtaaggataacagccaaatatgtcatggctctatttaaattcaaaccaacttgcacagttggtaagcccatgatttgttttcctcattgtatgcatttcgtggtgtgctttttatccttatcaaaattattgaaatggtctatggatagttgcttcattcattttgtaaacttattattcctactgttacaatggtgagcttttaataacttccatacaaatgttaatttttttatgaacaaaatccatatacagaatcaatgtgtgaatgatgaaaggtctcactattccggtgttgtgaatggaacaattcatgttgttgctggaggagcaggaagccacttgtcaaatttcagccaagtaacccctaagtggagtctttacagagactacgattttgggtttgtcaagttgacagcattcagtcattcatctctcctctttgaatacaagaaaagcagtgatggaaaggtctacgattcttttaccatttcaagggattacaaagatgtcttagcctgtgtgcatgatagctgtgaagcaaccacttcagcaacttgaactgcttctttgtacacatgcacgttctagtagcttttcttttctggtctttcttttcttgaaaaaaaaaatgtagccataacaaatgttatggcttaaacatttataatttttaagtaccctcaagtaaaagttattagttacactttattcaaggagtaagcatggtctgtacaattcttattgttcatgttagacttatagactatatagctgcaatagtacaatatataccaaattaatacaatactaatatactattaaataataaataacagtgggtagatggattacatacctctggccagttaaagatacaacaaaagcattcatttgcttttagttacaacttatcagcataaacttttgggctgaattactcttcataccagtaatagctgatagatcataaacttgttatcgtgaatgcacatatagagctctgcctatatgatcattaacttattatctgatacaaagcaattttctatctactggaaattaacctaaaagactaccactaaagctaaagaaaactaacgaaaataagataaaactcagatatttcattcattgattgatgatgggtaaagttgagtatatttatatagttataagaatatcaatcaactggtaataattaatcaagtgccaacatcgtattattttaacacaagtaaaataaaaactgttttataaattacatatttaacttcatcttatgtaatccttggaccatttaatttcttatcattatcttacttgagagagaaaacaaaaaatatgagaatttttggttgactaaatgctctggctatatagtatatagagctcccgtttgtgtcaaatgaaggagttatgctggaaataccggtactgatgtggatacaaaagttttagcccacctaacccaagaagcaaactcatgaaagttacaagtgaagttttggaacaagtgagaccagatgtaaaatgtgtgtaaggacctaacaagagttggttcttattttgacgaatatcttgaatcctataaaaatgaaattttggagttggttctctgcaaaattagatagaatgtaggtttttcaagttggtgtttggataagctcgacaagagaatagttagaaaaatagttcaaatctgaaaaattaatttttaattgaaagttattaacttattgaattagaagagtcgtttggtatacact

SEQ ID NO: 418 - DNA, 7075 bp, Glycine max; identical to SEQ ID NO: 294
  source 1..7075: mol_type = genomic DNA

SEQ ID NO: 419 - DNA, 2850 bp, Glycine max; identical to SEQ ID NO: 350
  source 1..2850: mol_type = genomic DNA

SEQ ID NO: 420 - DNA, 3460 bp, Glycine max
  source 1..3460: mol_type = genomic DNA
gtaaggatttcaatttgatctacataaaactttaatctggtctataaatttattttatgagcttagtgataatttaatatttaaataaaaataaaaacatatatatatatatatatatatatatattaaatataacttatttatatgatataaatatatttttaagatttactaaaaaataaatttcaaaatttaatgtaatattcataatcttatttaaaaatatattttacaacaacatatttaattaagacataaatttattttcaataatcttaattataagctttaacttaactcttttataaatatcaacatttaacaagacaaacattttaataaattataataaatttaatataataataataatattaaccatgaataattatttatgattttttaaatagaaccatctaataaatctaaaagattttttgaatattcagattttttatctgtttaattaaatagactaaaatataaattcatttctagtcacctgacttattttcatctttaagttataattatgacttagaactcaagatttttatttaagaatgtataaaaataaattaattcgcgtcttagatgtataaaaataaaaaataatatattatattgtgaaaagaattaaaaaaatgtaaaaaaattgagacatataaaagataagatgaataaatagcagaagaaaaagtaaatacgttgcttacttaagccatgacatgcctcggggagtggggactctagtcaacatcaaatttaaacacggaaggtcccagagctttgaaagtaacgtgctcgtgtagaaagccaaggaaggaaaataataccaaagaaaaatcctaaaatattctttgatacggtagtatctaaagtagaacatttgattatacataaaagtcaatttttcataagccaatgtctagtactcatcactatatataagcgggccataaccttcttcttttgcactacaaatcagttttttacttgaattttcttcatccttctctgttctcctagaacttgattacttgaacattccctatgacagatgaggtggttcttctggatttctggccaagtccatttgggatgagggtcaggattgcacttgctgaaaagggtatcgaatatgagtacaaagaagaggacttgaggaacaagagtcctcttctcttacaaatgaacccggttcacaagaagattccggttctcatccacaatggcaaacccatttccgaatccctcattgctgttcagtacattgaggaggtttggaatgacagaaatcccttgttgccttcagacccttaccagagagctcaggctagattctgggctgattatgttgacattaaggtacccttcttctgttcttcaagctttttatgctttgattgttacttgtaattccctacaattggttttatattatgcttttagattatgatgatgtaatttggttgttttattcccatgttgcttcctattattaacttttcccttcttagttatttagatgtaatttggaatatgagagatgtttaatgaaaggaaaatggacccatttggataaaaaatagcaactttctttagacacctttttccccctagattctccacaacctgtctaagtggttcagctgttttccgtgtttgctagttttgttcttttgttgttttatttattggtaaatattcctcagcctactttagcaacatgttgcaaaaagtatttgattatctttttaagtgattgatcttatgtctaacaaaatgtatttgattgtctctatcatcccttctggtatcactatggtagatatgagtgtattggttattattagtggctccttttttctcattcttacattttatgatctaattgggtgttaattcttaatgtcgaacagatacatgatcttggaaagaagatttggacatcaaagggagaagaaaaagaagctgccaagaaggagttcatagaggcccttaaattgttggaggaacagctgggagataagacttattttggaggagacaatattggttttgtggatatagcacttgttccattctacacttggttcaaagtctatgagacttttggcagcctcaacattgagaatgagtgccccaggtttgttgcttgggccaagaggtgcctacagaaagagagtgttgcaaagtctcttcctgatcagcacaaggtctatgagttcgttgtggagataagaaagaagttagtcatcgagtaggtttcatgttggatcttaatagccatagtgaagtattggtcgttcttgacctttcaactaaataatatttgtgtaataaaaaggcatttggatgtgccaaacttcatgctttctgttggattgtgtaggttttaaaatttttctgatgtatctttcatgtgtttgttggttttgcaatagagtattttccgtattatcatatatttgcatagattaacatcgaattatttaaaaatgtgttaatacatgtgtcacaatagttttgtgtgtgtgagagaaaggtatattatctttaagaaaagtatatcctagatattctttagaggttcaagatcgatgaagctaagtcaatgactacctcatgcatccattaaccattttagaatctaacacaacttgcaaatcaacttcttaaaaaaatagagacataatcggatcccttatgtatttagctgttaataagtcaaatattttacacagaaaaataataaataaataaaagaaaataatcattttacagaattaatctcatatcatcattaatttatttatagattttgttgtctatcattaataagagattactagtaagtgaaagaaattaattaatgttacattaaaaaaattaaaatgacaattattttagaattatttatttttcttaaacaacaaatataatacgagaaagactaatatttatgacttctaaattattaattacatttcttaacttttgtgttagatttttttaatgtcaaacaaaatgtctgttttgcattcatatctatgttaaacggttatacatgactttttttatttttactttcaagtttgattgtttaaaaaagtatattaattaaaaaaaatgcatttctattaaataatgtgacgatagtaagttttttaaatatgtgacatgtcgtgattagctgagggtgtaaaattttttaatacttattttttactaataaaatccacataattaatggaacattaaggaaatataaaaaataagtattaaaaaatgagataaaaacaagataaaataaaaaaataagcatatttttaatagtaccgaaaaataagatgaataaataaatgccagtaaataatagatgaaacaaagtgcatggtttaatgtcacacaagtttaattcagaaaaccttcgtattccaggaaaatgcgaaggtga

SEQ ID NO: 421 - DNA, 4186 bp, Glycine max; identical to SEQ ID NO: 237
  source 1..4186: mol_type = genomic DNA

SEQ ID NO: 422 - DNA, 5853 bp, Glycine max; identical to SEQ ID NO: 305
  source 1..5853: mol_type = genomic DNA

SEQ ID NO: 423 - DNA, 6435 bp, Glycine max; identical to SEQ ID NO: 378
  source 1..6435: mol_type = genomic DNA

SEQ ID NO: 424 - DNA, 3634 bp, Glycine max
  source 1..3634: mol_type = genomic DNA
catgagtagactccttatttataattacaattatagattataacatgtcatcctttactgaaaattagtcttgtaattgatttagaagaataatatttaaggaaatactcaaaatcttaccacaaagtctaaaatctcaacgatagtcattaaaaaaaaaaatacagtatgtgaaacttctacgatgaggtaaaagcaaaaggataaatgaagaagaatgtgcaagaggagctgggctagagattacgcggtgaggtggggccttatgtcgtagaaggaaagctacaaaatcataaatcacgcgagatgatgatccaactcgtaacccacgtgtactcttcaatcactacaaaaagtcaaatcaacgcgccaacaacatggacgccctgggccccaaccgactagcccacacttccctccaaaaccactgtcgtaagcagtgacaaaatcacctcgtgtgggctcgcgacacgcgcgcaccacacttcatagcgccacacgtgtccaattacatatcacctaacttttttttctctcctaaaatcctgccattgaaataaaaggaaatgtaaaaggaatcagaacacgatacaaaatactagagaatgacggccattttattttaacctatttactaaattctaaaactgtcaccctacctaaccttggacttttaatttgaaaaatcaattacacaaataatagtaataagatgtacaattaaagacaaaaaatgaaacacttttttttttctttctttcttttcccacgctctactccacggggtatgcgcgtaacacgtacggtgagaaataaaaagaagataaaggatctaatattggtaatgtaataaaacttttaaaaagagtgaataataaaaatgaagccccattatcgcccatgtgtattctagaaactagtggctgatggtgccacgtgtcgcgcgcatcggctataaataaagggctctcccttatgtaataagtttcaagcgccgccaccatagttggtgttagtcttggtgtagtgtagctagggagggatatatatctgagtaagatggcatcagagcttgaattgcccccaggcttcagattccatccaacggacgaggagctggtgttgcactatctctgccgcaaatgcgcgtcgcagccaatcgccgttcccatcatcgccgaaatcgacctctacaaatacgacccctgggacttacccggtaacataatcattcattcattcattcattcttcgatttctgattcttaatttttatttattaattgttactgtgttactttacaggattggctacttatggagagaaagagtggtacttcttttcaccacgggaccggaaatacccaaacggttcgaggccgaaccgggcggctggcaccggttactggaaggcaaccggggcggataagcccattggtcagcccaaaccggttgggattaaaaaagctttggtgttttacgcagggaaagctcctaaaggggacaaaagcaattggatcatgcacgagtatcgtctcgcagacgtagatcgctccgttcgcaaaaagaacaccctaagggtatatacactccgtacttctttctagttcaagattattgctcgaaattacgactttgtccctacgctctcatcggctgaggataagtccaggattttggtggaaaccatgcaaaatgtatggtcgtaatatgttatcatgtgaaaactaccgcgcggaaccttcactagttgaagacttgccagcatgtggtctgggcttgggcccaagaaacttagccatcacattagatccaataaaaaaacaataattgatgcggaaagaaataaatcttctgccaatcgcaattatcactttccatttttagaaaactattccttctttatctctctcacctgcctccgattgcaatacttataataataaatgaaaatgaagaaataatcttacggtggttgtgatttttttttttttttgtcgcagttggatgattgggtgctttgccgtatttacaacaagaagggcacgatcgagaaactgcaaccaagcagcgatgttgctcatagccgaaatatcgaatcctcggagatcgaagacaggaagccggagattctgaaaagcggaggaggttgtcttccgccgcctgtgccggtgcctgcgccgccgcaagcgacggcgaagacggattacatgtacttcgacccgtcggattcaatcccgaagctgcacacggactcgagctgttcggagcaggtggtatcgccggaattcgcgagcgaggtgcaaagcgagcccaagtggaacgagtgggagaaaagcctcgaatttccatttaattacgtggatgccactctcaacaacagcttcatggcccaattccagggcaataatcagatgttgtcgccgctgcaggacatgttcatgtactggcccaacaagtccttttgagcacatcatgatggttttaaattacgatccgcaattgctcttaagattttctgactcaccatgcgaccacaatcgtaatttaaaaccatgtcacataaaatccacgcgcgccgcccattcgcatttgcacggtagcacgagactcaaggtccatgagtgtgcctgtgcgaccacacacatacgattattgatcaagttagcttagctaggccaaagtaagaaagaaagaaacattgaagctggaaacgcatgtgttggctccaccgtttgctttggtattttgctatgtgatgatgacgacgacgatccaacggtgcatgtgtgttgacctgttcctagtagtagtagtagcatgtgtacagctattgtagaatgtagataggtacactactacacgttgttgtcatgtgatcatagaaaggtctctcaccgtacaaaaaaaaaaaaaagtgatagaaggtctatttgatagaccttctaattaatatatgttgaattattattagcatgtgttacatctaatttattaggcgtgcctttgtcttttctcatttttttaggtctttttaaattgagtatcgtgatatcctactgtgtttactttttcatttcaatatcttttgttttttatgtactactataatataattaatataaaacaattttagttatttttactttcgtcattcacatatacttaatacactttctccttcttcaggttattgattttgacaactaaatttaatttttatacatgaataaaagaatcttagatgatgaagatggccattagttttacttcgataaatgtataaaatactcgcacttacgtaattttgcacgaattgcggagttcttattggactggaatgaaaacattttattaaagggaatcaaaatattcaatatgaccaagccataaagaaaatcagaagcctcttcaattcgtcacaatctgaattttaaaagcaaaatgtgttaatccatgtgccggaccggagtttgttttgatgaagtgacggtgacaattattattcatatttccatgttcgggaccattctattaatttaaaatccacagcgcatgtattatccttacctaccacagtagagcagtgacgttgtttgaaacttaaatcgaactcagaagatctcgaaactag

SEQ ID NO: 425 - DNA, 4086 bp, Glycine max
  source 1..4086: mol_type = genomic DNA
gtattatttactttattttattttgacttgaacattaaattgcaaatatctttatcctttgcagaacttatttggccatcattaaaagaatcagcacactctcccgaatctccaagatacgtaatgactttcttctaaactgtgcaaaaaagggtacttgagaaaattattttccaaatagatgtagctgtttaagagggatatttccatgacactactaattattaaaatttttgtaatattttttagtgacaaataaaaaaatgtaaggtttgaatgtagtcaaaattgtagaataaagtaaactactatgatgaaaaatgcattatttgctgcaaactcgcaatcacctttctacccatagtaaatttttgaggaagacaagaagacagtagctgccatttttgagagtcttaaaaataattcatagttagtaataatataacacgtaataataaccacaaaagaaacgtgtacgaaaagaaatctaaatgaattatcatttgattttcaagttgttaagctccacttttttttttgtttctttttgttgtaattacattttttttatgtataaaattcaaaatatgatactttagttaaagagattaaatttaataatactgaaatcaattaattgttgattacaaaactgcactctacaaaggagatttttatcccttccttgttcttgttcttgaaaggaaaataaaaccaaaaaagtctggtatacccggaaatttggtgtaccgccaattggggaaaccaaaccacgtgggtagcgcaaagcataaaaacgtgtctataagaggcggagccaccattacaagcgaaagtatccaaaaataaataaataaaattgtagcaatcacaacacaaccaaggctacgacttaaagcaaccgcaatcttttggccaaaagtcacacacacattactacacgcatctaaacactcctccgaactataatacagttttcttattttcattgttgaagctcacaagcaaaggctaaagtagattctattctcctcaagcaaaacctatagctcccccacactcctccagtacttgaataaaagctaaataaatattaaagcctttccttcatcaaggtactgtttgatctttgaatttcagtcctcaaagattggaacaacaggaacatgtgtactctcacaactgttcctgtgctcccttctaagcttaacaagccttcgctttctccgcaccacaattctctttttccctactgtggaagacgggtcgggaagaagaacaaagcaatggttcctgtatgtgtttcttttcttttcttctgagtttttttttttattttttatcaacatttattgttgttgtgtttgtctcatgggtttgtttggaattgatcaggttgcaaggttgttcgggccagccatatttgaagcctcaaaactgaaggttttgttcttaggagtggacgaaaataaacacccaggaaatctcccaaggacttatacgctaacccatagtgatataaccgctaagctcaccttggcaatctctcaaaccataaataattctcaggtatgtggttttgatctttcaattttgttttcctattctttcggaatcgttgttaagaaaaaaaattggtggaggagaggatgcaaattttgtcacaaaacagaggaaatcagggtatcttacattcttgcggtgtaagagaacattttttgggccaaaagggtaggaactcataatagatggtaacatgtgaatcatactgccgaccaaattaacatgttagatgggtgtttggttgaattcattgaatttattctggagaaatagtcttattttattttattttcagttgtttgaaaaaattaaaataaaacaaaaaagtgattattttgcataatctgatacgaaacacccactacgagagaggggaaataggatcggattgcccaacactccaatccggtagaaaatgaatctttttaagtccaaactgtgtgtttgacttatgatttgtaacctcccaacctaaaattggaaagtgtaaattgtgtttgtttaccaattatgatatattttagtgactcataataaagttgtatttgaacttgaatttgggtaaaatcatggtttagaagttgttccataaacccaaattgtgtttttttgggtttttgcaaaagacataattaaggagcgaagttgtcatatgatttaaggaatgaacatgggaattgaattgcagctgcaggggtggtacaacagatttcaaagggacgaagtggtggcacagtggaaaaaggtgaagggaaggatgtctctgcacgttcactgccacattagtggaggtcattttctcttggatatattagcaaggttaagatacttcatcttctgcaaggagctaccagtggtaagctacttttgcttgcaagcatcaaattatggtttgtttcactgactggtcaatgaatgaaaaattaaacgcaacatgtttcctattgcgtgtgtaaattaggtgttgaaggccgtcgttcacggcgatgaaaacctattcaacagctacccagaattgcaagatgccttggtttgggtctactttcactcaaacattccagaattcaacaaggtggaatgttggggcccactgaaggaagcgtcagcacccacaggtggggtccaggaggaggggttggcaattccacagccatgccaagaagaatgccaatgttgctttccaccgcttacgttgagccctattcagtggtctaaacaagttcccagccgccattacgaaccttgtgatgggattgggacccaacaaaatctataaacagccaaactactacaattcacagttacggggatgctgccaaattggcaaattccctgtatacaaattaaatattcgaaacccatttcaatgtaaataaggaagctcgtatttgcaatttttttttttttatatatttttctttactttctttgttatgatttttctttcgtaagaaattaaattagttcatgtataatatgtctgtatgcatggttatttcaaagaattaaacagatttttgtaaggagtggaatttcgtggttgtaatattgttttctcagtttcgttgtttcttttgcgttataatttttagagattttaagtcgagaaaacttggttgaaaaaggacaacgacaaatgttagacacgctaagtttaaaatatttaaatttaagattgagatgtttgaattaagatgctattctgccgtggaagacaacattcaaaaatgctggtgatgatagtaaccaacaaggaagaaaaggccaaaacaatgtacaataacgttattttgcaagttattttttttcctacatatttatctacctaaatgaaatattatatttttttccggtttaaaaatataaaatcagttatcttgaataaaagaaaaagaaattgaactaaggggtgtgttcttaagactataaagtagaaacacacaaaagcccctgcctcgcattcagagatgagatgagatagtctcattattagttcctgacttgaccaagaaatgagtgcatggattgacttcatcaagaacacggctaatgtaaaattgtaaggcgagtgatatatatatatatatatatatatatatatatatatatatatatatatatatataacattgtagatgactgaaatatttttctatcaagtaaggacgtttagaaaaacttatataacacaattatattttattttataattaaacagttaagttgaagtttaaagctatttaattatcgtcataaaataatttataaggttttttttacttaggtttatgatgaaacttatgagaataaatttattgaattaaacaattttgacataagctctcaagttccatttttagaataaataagttcttattaaaatagtatttgttaagttgtttaattaggaacaaatttatataatcagccttgacaatatgctaattaaagaaaataagaaaatatgtatgtgtttagttatgattagttttttttaacaaaaaatgacagctttctttctca

SEQ ID NO: 426 - DNA, 3455 bp, Glycine max
  source 1..3455: mol_type = genomic DNA
tcaagtagaatttggagcattccaaaaacttggagatccaactacaaaaaaacaggtagtctaacattcttttgttctttttcgactttttttatgattttaaatttcacatagagaactagataaatctttatttcaatcattgcagttactctttttattttatttgttgggaaatgatccccaataaacaggtatgaaagctataattgtaaaccacaatcaaatctatggaagcattggtttatacattcctcttagtctcgactttaggaattatttttttcgctatcttttttagagaaccccctaaagttccgacgaaaaaaggttaaataattttttattatcttaattgaagtaatgagcccccaatatggagggctcattacttcaactagtccccatgttcttcaaatggatctcttagttgttgcgagggttgcccaaaggcaatatataaggcatacccagtaaaacttacaagtaaaccagatatagagatggcaattagggttgctgtttccattattagaattctaaagtttcaagatcacaatagatctataggataagatccttatatttacagcgaaatggtatacaaagtcaacagatctaaatgaataaaaaatagtatttatggctacgcaaaccgttgaggataattctagatctggtccaagacgaactgttgtaggggatttattgaaaccattaaattcagaatatggtaaagtagctccggggtggggaactactcctttgatgggtgttgcaatggctctatttgcgatatttctatctattattttggagatttataattcgtccattttactcgacggaatttctatgaattagattcacaagaatcgggtaattagtttttcaatagaaaggaaagttaagcattttggtttcttattgtttgttagtctatttcatttggatttggtagtttgatcgtggaatttctttgtttctgtatttccggaatatgagtgtgcggcttgttttaatggatcctattgaaagtacagaacataaaatggatctgtcatcttgatagagatggttttatcccgtcagatatttcttctagtatctggagcacggaatatagaaaatggattctaaaaatattagaactatgattcatactaaatatttagacctcgcaaccggacttaaaaaacttttcaaagagttttaaaaataaattgaataatttgcattcttttaagtttccggagcttatctttattttgatcaaaggacaaacgtttcctttaatttttttcattatatctattcattgaataagtgatgatccaacagttcttactcagggaatttttggacttcgatttaaggtttttttgaatcatcgtggttatagtatgaatctgatgtttttttaattgattcatagggtcctaacaagagaattcctatcaataataaaaattcaataataataaagaagacaacagtaaaatcatattatacacaataaaaaaatgaagtaaatagtagaatattcaagaggccttaaaagatcaagataaagacgaaggagccgacttgatattttagcattataaccaaaaagaatagctttcggatctctattttttattatcgtcaaagaaaattagaatcataggattaaataaagaaatttcaaactttctattacacatatctgttttcgttacaagcagtatttgggtatttttgtttgagccgtacgagatgaaattctcatatacggttctcagggggggtccgttggtttacctatctcaataaagtctatgattggttcgaagaacgtcttgaaattcaggcgattgccgatgatataaccagtaaatatgttccgcctcatgtgaatatattttattgtttaggaggaattacacttacttgttttttagtccaagtagcaacgggatttgctatgactttttattatcgtccgaccgttactgaagcttttgcttctgttcaatatataatgactgaagctaactttggttggttaatccgatccgttcatcgatggtcggcaagtatgatggtcttaatgatgatcctacacgtatttcgtgtgtatctcacaggcggttttaaaaaacctcgcgaattaacttgggttacgggtgtagttttggctgtattgactgcatcttttggtgtaaccggttattccttaccttgggatcaaattggttattgggcagtcaaaattgtaacaggcgtacccgacgctattcctgtaataggatcgtctttggtagagttattacgcggaagttccagtgtgggacaatctaccttaactcgtttttatagtttgcatacttttgtattacctcttcttactgctgtatttatgttaatgcacttttcaatgatacgtaagcaaggcatttctggtcctttatagtgaatatggatcatagatatttgtaatcacaatcattttttattttggggaggaatttatttcattgctacaaatatggattatttaaaagaataagacatgtatttggatatttcccttcaacttaacaaaaattgaatttttttccatacacgcacgaatagttgaagggaactctccgaagaaaaaatggattatgggagtgtgtgacttgaactatttattgggccacgcagatatctgactttatcttatctgccacatttgaatttataattaaatgtgtcttttttccaaccaccaagtaaggctcttacagagagggtaggctggttttacttgaaaagaatcttttctatgatcagactcgattatattctacatgaacaggctccgtaagatccagtaaaataagtaatgtagtatagtctgaattatatcatatgtatttcagtaaacttaatagtatgacaacgcattcatttcctatgcattgattcgatttctgatactatcggagtgaaaaaagtagatctaaagaaaaacgcgggttggattatattagtaacaagtaaattctttgtacgtaaaaagttccaagattttgttggacagaataacaattgcaaagtttgagatcacccagaaagcattatcaattttaaaagcctactcgggtattgagcgtttatcaaagtttacttaataagaacttaatttttttttttttcaataaagaattgtttgtaacttcggaaaaagagaatctagtttattttcttacatagaatcctcatatatgtgtgaataacacatacattttttctatagatacattcgaaatctttgattagtgctcgagccggatgatgaaaaattatcatatccggttctttcggaggatggatctataagaattcacctatcccaataacaaaaaaacctgacttgaatgatcctgtattaagagctaaattggctaagggaatgggtcataatt

SEQ ID NO: 427 - DNA, 3710 bp, Glycine max
  source 1..3710: mol_type = genomic DNA
catagtaacgagagttattaatatcttttttttaacttggattttagtttctttttaattatttttgagtaatcaatatatattttctaggatcatcccatcttatttgatttcaagactatttaattactttgaaagttacgtggtatatctgcacatgaatcacctaactgctgaatcttcaaacaatatttaatgtcatgaattaatattaaaaaaaattgaatctacatttcttacaaacacaagacacctgcatggtcgaggaggagaccagggcaacttcatcaaggcgagaacgatgctttaccaaggtctgcctgatccaagagaggccgagacttgggtttatttcaaacacttatgtggacaaaacacctcaatttgacaaatgttatcttcgaatttgattataaagtagtggtagatggagttaaaaatgttattagagactccctagattttcactgtattatatataagtgtagagtccttctttcttctattctaaactcagtagtgagtttcaataggagactaattagtggaaaatagtcaagttctacatcaactgtctcaatttttggagtgtaacttatatacctgtgggacaatttcacttaataccaattagttttaagatgaaatttaatactaacaaatcatgttgctcatgtcttcttggcagcaggatatcatgctagcatccaaattttttattatattctaaattgtatatttccatacaatatgaatgacgtgaagtaattatgtttcctttcaaaaaaaaaaaaaagacatctgcatggtagcataacagaaaccagtccaggttcaatgcacataaatcaaaatatttctttattgtacgtgaacggaatcttcaacttcaaaattgtatttgcaccacacaaaactttctcttgttccttaaataagagaacaacccaaaacctttccaaaatacacgtgcagcaaattgcttacccaatcaccagccatgggagaggttgacccagctttcattcaagaaccacaacacaggccaaatctctccaccattcaagcagaaggaattcccataattgatctctctccaataaccaaccacacagtttcagacccttctgcaattgaaagcttggtgaaggagataggacgtgcatgccaggagtggggcttcttccaagtaacaaaccatggagtgccactcactctaaggcaaaacattgagaaagcctcaaaactgttctttgctcagactctggaggagaagagaaaggttagcagaaatgagagctctccaatgggttattatgacacagaacacaccaagaacgtcagggactggaaagaagtctttgattttctagccaaagaccccactttcattcctctcacttctgatgaacatgatgatcgagtcaatcaatggactaatcaatcacctcaataccctccactcttcaggtaattcatctgtactttgcaaggttttaaataccggtcgtgttacgattttgtcgcgtttgatgatatcacggaaaatcacaaacaaatgtggttgaagcggtcacattgtggtcacatacagttaaaaaactttgatgttgtggcccaaatcacggtttggtttaactgtctatgactgcaatgtgaccaattgcaattgagaccgcatcaactgcatttgtccgcgatttttcacgatatcaacaaacacgaagaaaccgcaatgtgactgcaactaatatttaaaacctttaaaacaaaagtggattgtgttcaaaactaattgttcagcccacagtcatgacagctggacagtttttataattctattgatgatgtgaatacgagcagggttgtaacacaagagtatattcaggagatggaaaagctgtcctttaagctgttggagctgatagctttgagcttaggccttgaagcaaagaggtttgaggaatttttcatcaaagatcaaactagctttattcgactcaaccactatcctccatgcccttaccctgaccttgctcttggcgtcggtcgacacaaggaccccggtgccttgaccattcttgcacaggacgaagttggaggacttgaagtgagacgtaaacgggatcaagagtggattagagtgaaaccaaccccaaatgcttatattatcaacattggtgatactgttcaggtgccagtgcaataccatattgaaaactgaaaattttaaatttcacttacacactagttgtaacacactctatcattggtttaaattaattgaaaactataaaatcatgagagagacattaaataagatgtgagaacaacaactttcttgtaatttcccataaatttaaaccaatgatagagtgtgttagagagtgtgttgctagcatttctctaaggaagaaaaactttcacttgaggattggggttgcttgtgcaggtttggagcaatgatgcatatgagagtgtggatcacagagtggtggtcaactctgagaaggaaaggctttccattccgttcttcttcttccctgcacacgacaccaaagtaaagcctttggaggagctgataaatgagcaaaacccttcaaaatataggccatacaattggggcaagtttcttgtccacagagggaacagcaatttcaagaagcaaaatgaggagaacattcaaattcatcattacaagatagcttaaagggtagtatattagcaggattccagcgccatatagcttatgcatataaattgggtatgatatcatgatatgtagcagcgttgatccaagacaacgtttctgatataaatgactgagtcaaatttacttcctagtgtgccttaatgtatgcaagtatcaccgaataaaacaactaaattattaccatttatcatgtttgtctcaaaaattgaaattgcattggactttaaattcacagttaacattttttgtgccttgattttcgttttcttataaattagtctttcattataagatttactattgaagaactcttaacatcgtttgaacctttacatcgtttgaacctttacatgcttctctccttttacttttctttggccaactacctaaaatgtcagccttatacccaccctgcttgcaggatcaacagaaaggcactggacgaatatctcttggtaagttttgaaatacactttatttgaataataataaaaatcatttttgtatgctatacatgtgaaagcatgctagcaaggtaatccaattaagtgacaatgcttcattcagcttgccgaaatcgacacccctttttttctaatttgatgctcaaccctcaccccttatcaatctcttttgaaatctaccaatgtagcaaaacccttccaaatagcaatttgaagaaacaaaatgtgaagaaccttgaaatttatcaatataagctagctagtataattggggtataatgtgttaaagcagattgatccaaatacaatgtttctgatatgtgacagcaattgaatttgcagctaaaagttaccagtgtgcattatgtatagaagtatcaactgaatttaccatttaccatgttcattgttggcttatccaaaaaaacaattatgttcattgcaaaacctgaaattacattgctctttaaattttctgttttaacatttttagccccttgagtatctttcggttagatttatagggattttaa

SEQ ID NO: 428 - DNA, 7383 bp, Glycine max
  source 1..7383: mol_type = genomic DNA
caactaaattatatttcctttgctaaatagatatatctctgccatggttcacatcatctcttgtttgagtaaatacccatgatagtaataactttattgtcagacgaattcgtgaattaaatcacgattttaccaaaaaggaaaaaaaaatgacggacaaagtaaaaacaaaacaaaggggtttggattttggggaccagggcaattgtgttcatgaagtaactttactagtaaaagtgtaaaacttgtctatgaaaacttaattttcaatcctgtattcaacttatgactgataacatgaaaacttatgtttggattaaagattgaaaagtctaaaaatatttttactctgaaagcaataatttttctttctttctacgtgtattgaaattcgttactgtacattggaatttgacaaactacttttcaaactttttttttttttatagaaatactttgtaaactttaattcaaataaaccctaacttggacaaataaaatgatttgcattattagcacttatgtgtgcatttgttttgctattaacatatgctaatttaagtaatagagattactcttacctatgtgatcttaaatttgattgcggaatttacatgtataaaaaaatacacaaatttaaataaaataattttagtttgaataattctcataaaattaactcaaagaacatttattgtttagtattccgcgcatcgctagttaccataatcctcgtacgtacccaagaagaagaaaaaatcttattacagcacttgctattttctaaggttgttgtcatgattgattcattgatgaaagtaaatcatacatgtcttaaacaaagaaaaaaataatttcagtttgattgcattgatatgcaacacaagtccatgtcatcattatcttttacagagtcacaaggtacaactgttgttgttacggatcaggtttttggatttattcaggatatttttcatgatgttgtggtaaaacaattgatacattttgatgaagtcgtggaagctgctggtagcccctagtgtagtctagtgtgacatgttcactgttcttatcctttcgtctctgttgatcatacgtgtctgtctcccactatcatcagtgcacgtaccttgtgatcttcccacacacacgtgatcacacgctaatcagatccttaccctccccaacacacttccatgattcattcactgttgcctccttttttgcctatatagttgctttaggctaaatcttgatttgatttggtgcttgattgtctaattatcttcggctaaactttgatagggttgtgaatattaaatatctagccggtgggtttttggtatcttactaattatattatctagttcaagtttgaggtgtgtttgaggctggatttgaagaactttccagttagttatctcttatcttgaagaatcattttattatataattatattgaatattccagctcaagtggtttgtggatattgttctttgattttatatatgcttttttgcaaccttattattattcttcagtcgcttttctttgctcgattggaaaattttcctcttttcttttatgtgattttaactggcggtctttaaattggtgactgagacatgtggggatgggttctctctgagtaggattttagattgatacctcacacaaagcaaagtggcatcaagttggactttcattataagctacttgtttgttggtcgactttggtaatgatttgaggctcttatcccatgttgctatagatatctttatatttttttcccccaaaaatccaagatccaacctttgcttctaatatctgagatatcaatcttcatatatttgcttttggtaaggatattgattaggagaactcggtgttttttgttttattgggtgtgtcagaaacttgttttaaggagaagctactgagagagctgttatatgaggttcgaagctttggctatgccatgaaaattttgaattgtacaatatgggtagcaacaggactattgtttggtttagaagggaccttagaattgaggacaatcctgcattaactgctgctgcaaaggagggttctgtactccctgtgtatgtatggtgccctaaagaggaaggacaattttatcctggaagagtgtcaaggtggtggctgaagcagtctcttgctcacttggatcaatcactgaagtctcttggatccagacttgtgctcatcaaaacccacagtactgctgtggctctcgtggaatgcgtaaaggccattcaagcaaccaaagtagtgtttaaccatctgtatggtaagtgtagctggtgtagatttagccttctgttttaaatgttttatccaattttgaacctatcatatatttagtgtcatttaatgttttggatctccaaaaagttgaagaagcaagtaggctttttctattgataatttggaggaggtttagggctgagcttcaaggtagggtactccttgaagacaatcctcaaaactgaacatattggtctgttcactaagtgacaattacttgaggcgttttctcatccttactatttttgttccgtgtttcagtttggtattatgttactgcaaaatgaagggtggatgattgtcaaagctagagaattctaaaaaacaatacactgattctttaaatgccataaaaaacttcgtaccccattgcccagaggctcttcgctatgcgaaggtatgggagagggatgttgtacgcagccttacccttgcatatgcaaagaggctgtttccggattcgaacccatgaccaacaagtcaccaaggcacaactttaccgctgcaccagggctcgccctcgattctttaaatgccataatacattaaaattcatttaaatctgtatgcttgtttctcaaatcaattatttagttttttagatggccactttaaccggttgagacatgagaattaactggcacttgtaggattgctttataacgaacaaaataacttccacatatattcttcgcagttcaatgctagttagctgatccatatttcttaccctaattattctaccagatccagtttcacttgtccgtgatcacaacatcaaagaaaagctagtggaacaaggcatatctgttcaaagctacaatggagatctgttgtatgagccatgggaagtaaatagtgagagtggacgtgcttttactaccttcaatgctttttggaagaaatgcttgcacatgcaaatggatattgtttcagttgttcctccatggcaattaattccagctgaaggtatgatatgactatatgcataatgcatgttacttcgatttgattgtttctcgataatatcattgttgatacaaggttattgctagaggttatgaactaggaaggaggtctagttcttagataattctattatggaaactagcagtaatctgatcaacttcaacttctctttttatatcaacctgtctatataccgaatggtatacatatatggacacaaaaaacatgtcagaaattgtttctctttttggacgacaggaaaaattgaggaatgttcattggaggaacttggtcttgaaaatgaatcagaaaaaccaagtaatgcattgctaggacgggcatggtcaccgggttggagaaatgctgacaaggctttaagagaatttgtggagcttcatctacttcactactccaagaaaaggctgaaggttggtggagagtccacctcactcttgtccccatatcttcattttggagaattaagtgcaaggaaagtttttcaagtgacttgtatgaagcaaatattatggacaaatgaaggaaacagtgctggtgaagagagtgcaaatcttttcctcagggccattggacttagggagtactcacgctatctttgtttcaactttcccttcacccatgagagagcacttctggggcacttaaagttttttccttggaatcctgatcctgatatctttaagacttggagacaaggtaggactggctttcctttggttgatgcaggaatgagagaactttgggcaacaggatggatacacaacagaataagagtaatagtttccagttttgctgtgaaaatgttgcttctaccctggaaatggggaatgaaatatttctgggacacacttctggatgcagaccttgaaagtgatatcttgggttggcaatatatctcaggaggcttaccagatggccatgagcttgagcgcttggacaatcctgaggtttgtcatgttttccttcattcaaaggatttacagtttgcttggtatcactcagatgtgattattttatattccatactttactttaatttctatgcatttaaaagtttgtttaatcaacataacatgtataacatatcactgcctgttatagcatttgactttactgcagcaaaaaaatcttttgtttccttaccttgcctctgtcctcatgtgccattttttgagatctaaggatgttgattatactaaacgttatagtaacactgcataaaactagaagatattagttttgtgttgtgaagcaaaaactgacacaatctgagttaccctgctgcctgtagaaaaattagagacttactttttcatattttcttcaattccttttatacctgctgaaatttatctcttcatatttcttttacaagttttaaaaggaataatgctccaacaaccaaagtatatcttgtttctatctaacatagataatttgaattttgagattttttgtttctgtctaaccaaagtatatctgtttcatgtattagtgtagggcatgccaatatatttgtattttgagattttattttgattttttctgattgaatatccatggctctcttagttctatttatccattaaaacaactctgtagattagtatttctaagaagaactatagtagttgaaagagatcttttgccaatatgcatatttaactgaggctgttattacttgttcctcccctcaaaaagaaaagaaaagaaaagaaaaagaacctattagcctccttcattgactattacatccataaggagtaagttctaccctttcagagaatagaaaaataatcaaaataaaagttagcagtctcacatctctaattttggtgacagattcaaggggctaaatttgatccagaaggtgaatatgtgaggcaatggctacctgagttggcaagaatgccaactgagtggatccatcatccttgggatgcaccacttactgtgcttcgagcagcaggagttgagctgggccagaattacccaaagccaatcattgatatagatttggccagagaaagactcactgaagctatattcaagatgtgggaatctgaagcagcagcaaaagctgctggctctgaaccaagggatgaagttgttgtagacaactctcacactgttgaaaatttggacactcaaaaagttgtcgtcctgggaaaggctccatgtgctactatttcagctaatgatcaaaaggtgcctgctcttcaggattccaagaatgaaccgcctacgcggaagaggccaaagcacatgatagaggaggggcagaaccaggatcactctcaaaatcataacaaagatactggcttgtcaagcattgaccaagacatttgctccacagctgattcttcatcatgtaagaagcagtgtgccagtacaagctcatattcattttcagttccacagcagtgttcctcatcttctaatctgaagtggccatggcaagagaagattgatatggagcagagttcaagcaaagatggtaagtacattcttacatttccaagggatttatgaaaatgcattctcaaacaagaaatgcattgctgatctaagaaaatttcataattacattcattaatagcttaattattaaggaagctacaactgcaatgaaactatttatctctggaaaggaaattacaatttgatggaatagttctaacttctaagaattggataggctagcagagatacagtaacaaattaacaatttagctgaagagtaaaagaagagtgaggaaccaattctctttcttctttgttctgttgctcatacgtaacataggtgacccgaatgcagttttgagtaaattaggttccttccatcaaattcatagccttatgccacattagcagtttatcccatgattcttaggttttacaattatgttggtcctgcttttggaactcagcatgttcattagtgcatagtagcttatagttctcttttataattattatcattattttacactcaattttttataacttttttttggctttggcgtgctactgatagataagaatttcaatgcaggagctatgtgaggttgatgttgttcttgttgacaaaaccagtagcagctgcattgttcatggaaggaaaatggtgccatatttaagttttgcagtttgtttatagcctatgctatcaatcagttgtgtaataggttatgaaatcctgcaagaggaacacggattacaacaatagtgagcattgtatattatgaacttgtgctgatgggctgttccatacacattctgacaatcccgtaattacaaaccatataaccaaatactctacacattatattactctaaaatggcttgcattttatccttcttactccagcatttttttttgcccaattacacaactttgttcaaaatgtttaaaccataactgtaaactagtacagcctttcttaacttggttaggatttaattctgtcatgtgatgttgtgtgattaaaagttttagaatttggcactcttgataaatttcattttttaaaaaggttcagcagcttcttttgggtaggtaatacaaatctatagcaaggaaaaaacctcatgtatatgctttccgatcaaaaacatctccatactcaaaattataatgtttttttttatcggcaaatattagattgttagaatgatagttttattactagagagaattgaacttagaacttttttctctttcttttttccttaatcatccaaccatcttatatctcctgtaacaatggtaatgatgtgttatagcggtttgttctttgattttattaacttacattaaggaagaacaaaaccaagaaagtaattcaagatataagattattacgtcttttcatctccatcaaacaagaggaaataaatctatggaggctatgcataaatataatatcacttattcatcaccttgtctacacacatggatcttaattaaaatgcaaattttgattatagtagaataatcaaattctaagcagaagaggtaaagttaaagttggcacagttggcgtgctccaagaagagggagcgg

SEQ ID NO: 429 - DNA, 3017 bp, Glycine max
  source 1..3017: mol_type = genomic DNA
ataggtcataagtttaatcgctaactcgaccaatatcgtactggtcaattacaccaagtttaatgtcctgtcaatccgatagataactcgatctggtctaccatcgttgtcaccaccattattttaccgacatcaccaccattgtcattgttgtcacttccatcattctatctttatatcgtcattattttacaatagagcgagataaaataaaataattaatttattttatttatcttcaatttataatatttttataaaaattaaaaacaaaaaataaatcaaaattcaaaacgaaaactaatttaaattttttaaaataaaaaaaaaaacaaaaaacaaaaagccacctcaaaagagcctaaaaacttgtgtaatatcagtagttaatttccaataagaggggataaagattagtttaaaaataaaaaatttataccacttttagtcttatactcttacacttaacaatattggtttttaaaaaaaaattatactaccacattgaacaatatttaaacaaacgaaatattttccttgatacaaatgcaaagcacaaaatcctgattagaatcccatgtaccatattaggtggcattgtattaatgagtttagctgtatgagtttagaaataattttcgggaagcagcataggaactaaggaagtaattaattaacttatccgagcaataaacagcataaccctagtctcgaaacaaaaccgaagaaaatcaacaaaagcaagcaagcagcgattccaaattccgaaaccaatactagtattatgcacctgtggagtgtggtactctctttattcgatgcacaccaatcccttccttatttttctctctcctgtttatataaattgcatgttacaccgccctattccaccattgacagagatgacatcgaaaccccttcaccagagcctaatcaacatcaacactgaaggaacgaccttcccaaccatctttcccctctaactgggcccaaccaaccaatggcctctctccttcctcaaccccaagaaaccaaacccaccgccaccaccgccacagaaaccactcccagcgaaacatctatcactgctagtgccaacaaaagcagcagcagcaacaacaacaatagtagtagcaatagtcgtaagtgcaaaggtaaaggtggccccgacaacaacaaatttaggtaccgcggcgtcagacaacgaagctggggcaaatgggtcgccgagatccgcgagccacgtaagcgtacgcgcaagtggctcggaacatttgccaccgccgaggacgccgccagagcttacgaccgcgccgccatcatcctctacggttcgagagcacagctcaacctacaaccctccggttcctcttctcaatcttcctcttctcgctcctcttcctcttccactcaaaccctaagacccttgcttcctcgcccttctggttttactttcaattttcccttcaactccgcccccgccaccaccgtgccttacccttataacaatagtcacaattacacttacaccccacccgtgttgtaccctattgataatagtaagaatcacaatattaatacagtgcaagttcatcatccacatcactatcgttgtcctgaggaagtggtgcaagtgccacattcggaatctgatttggggggtttaggtgggaataataatattgttgttgatggttctattagatcaacctcgtaccagcggcatggttttctggataatattaataataacaataaccatgtgcatgtgcaagtgcaacatggggttttttcgaatcaacagcagcaacatcagaatagcgtggtggagggagtgaattcctccgtcgtgggttcggtttcgtcttccatggatgcttcttcggtggatccggatctggcgttggtggggacaatggggcttggatcttcttcgcctttttggtccatggcgaacgaggatgattacactggtagtttgtgggattataatgatcctttcttctttgatctttagagaaatttgagtataaaattgcttggttaattagcaattataacatgtttattgttcaagttaattatcgttcgattggtttgaacttagtattagtacatcgtgatggaagaggatcacagatagattaatggatactgttgtgaataaagtgttgggtagactacgacgctgctgaaagattagtgcttgttagtattaattgttaattgtggataatgagcttgatagaattaaataaaaatatttttgatggctgagatttagttcagttgaaattaatactaaacgcagtgcaaatacatttttctgctggtgattgagaagcaatcagcaatggagttatatatcttgccattagtttcgtccgattattcggtaagcccagctctctattatttggacttcaatattgtatgattaatttatatcctttgatatgtgatgtttaaattaatatatatgtagtcattctttcccgggatcaaatctttctaaggttttcatggaattttacctgtgaaaccagaaattgagaaattgaatgattgaaagaaaaaagaaaaagaaaagctgtattattattattttcttaataaacgttgttcttactttgtctatataattttttcttctttttatttgtctaattgttgatgcaaacattcttcaatcttcacagttatgttcttgttggcatggcccaatattgatttggggaagtatgaaaataatttattacaaagtctaattttttttataaacctaatatactttcttagaattttgttattataaattatttatagtttattttaataaattttatttatcatggattttaaattttatattacaaattttagattttgtatataaagttacttagtgggttaaataatctacaagaatatggagatgaaaactgagaagtatggtttttataattgtgtattaaaatttttatttcctcatcatatcggtatatgataatattaat

SEQ ID NO: 430 - DNA, 5106 bp, Glycine max; identical to SEQ ID NO: 341
  source 1..5106: mol_type = genomic DNA

SEQ ID NO: 431 - DNA, 7078 bp, Glycine max
  source 1..7078: mol_type = genomic DNA
tattacagtgcttgctatttactaacgttgttgccatgattgattgattcactgatcaaagtaaatcatacatgtcttaaacaaaagaaaaaataatttcagtttgattgctctgatatgcaacacaaattcatgtcattattatcttttacaaagtcacaaggtacaactgttgttgttacgcccatcaggtttttggatttattgaggatatttttatgatgttgtggtaaaaatttggtccattttgatgaagttgtggaagctgctggtagcccctagtcagtgtgacatgttcaatgttcttatcctttcgtctctgttaatcatgcgtgtctgtctcccactatcatcagtgcacgtaccttgtgatcttccacacacacgtgatcacacgccaatcattctctcaagcctccccaacacacttccatgattcattcactgttgcctccttttttgcctatatagcttaaggctggatctttacttgatttggtgcttgattgtctaattatcttcagctaaacttcgatggggttgtgaatattaaaatatctagccggtgggtgtttcacatctcacttatattatagtccgagtttgaggtgtgtttttttaggctagatttgaagaactttccagttagttatctcttattttcaaggattattttattatataacatattgagtggtttgtggatattgttctttaattttatatatacttctttgcaaccttattattcttcagtcgcttttgtttgctcgattgaaaaatttcctctttttctttgtgattttaactggtggtctttaaattggtgagtgagacatgtggggatgggttctctctgagtaggatttaggttgatacctcacataaaagcaaagtggcatccaagttggacttcatgataagctacttgtttgttggtcgactttggtagcgatttgaggctcttatacccccatgctgctatagatatctttttattttccccaaaaatccagatccaatctttgcatctaatatctgggatatcaatcttcatatattttcttttgataaggatcttgattaggagagctcggtgtttttttttattattattattgggggcgtgagaaacttttttttggaaggcaagggtgtgtgagaaacttgttttaagaagaagctactgagagctgttatatgaggttcaaagctttggctatgccatgaaaattttgaattatacaatatgggtagcaacaggactattgtttggtttagaagggaccttagaattgaggacaatcctgcattagctgctgctgcaaaggagggttctgtactccctgtgtatatatggtgccctaaagaggaaggacagttttatccaggaagagtgtcaaggtggtggctgaagcagtctcttgctcacttggatcaatcactgaagtctcttggatccagacttgtgctcatcaaaacccacagtactgtcacggctctcgtggagtgcgtaaaggccattcaagcaacaaaagtagtgtttaaccatctgtatggtaagtgtagctggtgtagatttaaccttctgttttaaatgttttagccaattttgaacctatcatatatttgatgccatttaatgttttgggtctccaaaagttgaagaagcaagtaggctttttctattgataatttagaggaggtttagggctgagcctcaaaactgaacatattggtatgttcactaactgacaatttcttgagatgttttctcatccttactatttttgttcatttgttctgtgtttctgtttgatattatgttatgtaaaaaatgaagagtgcatgattgtcagagaattctaaaaaataatgcattgattctttaaatgccatgacacattaaaaatcattatatagcaggtggcacaaagtattcatttaaatccgtatgtttgtttgttgactgttgagacacaaatgcatgtacactatgatgctttacttgtttcaagcattctagctctactacttttcttttgtttctcaaatcaattatttagtttatagatggctgctttaaccagttgagacatgagaattaagtggcactaataggattgctttataatgaacaaaataacttccacatatatttcttcacagttcaatgttagttagctgatccatatttcttaccctaattattctaccagatccggtttcacttgtccgtgatcacaacatcaaagaaaaactagtggaacaaggcatatcagtccaaagctacaatggagatctgttgtatgagccatgggaagtatatagcgagagtggacgtgcctttactacctttaatgccttttggaagaaatgcttgcacatgcaaatggatattgtttcagttgttcctccatggcaattaattccagctgaaggtatgatatgactatattaacacaatgcatgttactttgcattgattgtttctcaataatatgattgttgatatcgggttactgctagaggttaaaaactagaaaggaggtctagttctaagtcaattctattatggaaactagcagaaatctgatcaacttcttctctctttatatcaacctgtctacatactgaattgtgtacatatatggacacaaaaaacatgtgagacattgtttctcttcctttggatgacaggaaaagttgaggaatgtccactggaggagcttggtcttgaaaatgaatcagaaaaaccaagcaatgcattactaggacgggcatggtcgccgggttggagaaatgctgacaaggctttaacagaattcgtggagcagcatctactagactactccaagaaaaggctgaaggttggtggagactccacctcactcttgtccccatatcttcattttggagaattgagtgtgaggaaagtttttcaagtgacacgtatgaagcaaatattatggacaaatgaaggcaacagtgctggtgaagagagtgtaaatcttttcctcagggccattggacttagggagtactcacgctatctttgtttcaactttcctttcacccatgagaaagcacttctgggacacttaaagttttttccttggaatcctgatgctgatatctttaagaattggagacaaggtaggactggctttcctttggttgatgcaggaatgagagaactttgggcaactggctggattcacaacagaataagagtaatagtttccagttttgctgtgaaaatgttgcttctaccctggaaatggggaatgaaatatttctgggacacacttcttgatgctgaccttgaaagtgatatcttgggttggcagtatatctcaggaggcttaccagatggccatgagcttgagcgcttggacaatccggaggtttgtcatgttttccttcattcaaaggatttacagtttgcttggtatcactcagatgtgattattttatattccctagtttaattaatttaaatttctgtacatttttttaagtttatttaatcatcatatcgtgtataacatatcactacctgttatactatttgattttactgcagcaaaaaattcttgtttccttaccattcctctctcctcatgtgccattttttgagatctaaggagtttgattatgctaaacgtaatagtaacactgcataaaactagaagatattaattttgtgtagtgaagcaaaaactgacacaatctgagttaccttgatgccagttggaaaataagagacttactttttcatattttcttcaattcattttatacctggtgaaatttatctgttcatatttcttttaccagttttaaaaggaataattctccaacaaccaaagtatatctcgtttctgtctaacatggataatttgaagttctgtttcatgtattagtgtagggcatgccaatatatttgtgttttgatattttactttgattatttatctgattgaatatccatggttctcttagttcttttatccattaaaaaactctagattaatatttctaagaagaactatagtagttgaaagatatcttttgcaaatatgcatatttaactgaggttgttataacttgttccttccctcaaaaaaaaaaaaaaaagaaagaaaaagaacctattagcctccttcattggatatattacatctataaggagtaaattctaccggttcagagaatagaaaaataatcaaaataaaagtcagcagtctcacatctctaattttggtgacagattcaaggggttaaatttgatccagaaggtgaatatgtgagacaatggctacctgagttggcaagaatgccaactgagtggatccatcatccttgggatgcaccgcttactgttcttagagcagcaggagttgagctgggtcaaaattatccaaagccaataattgatatagatttggccagagaaagactcactgaagctatattcaagatgtgggagtctgaagcagcagcaaaagctgcaggctctgaaccaagggatgaagttgttgtagacaactctaactctcttgaaaatttggacactcgaaaagttgtcgttctgggaaaggctccatgttctactatttcagctaatgatcaaaaggtgccagcacttcaggattccaagaatgaaccgcctacgcggaagaggccaaaacatatggtagaggaggggcagaaccaggataactctcaaaatcataacaaagatactggcatgtcaagcattgaccaagacatttgctccacagctgattcttcatcatgtaagaagcagtgtgccagtacaagctcatattcattttcagttccacagcagtgctcctcatcttctaatctgaagtggccatggcaagatcagactgacatggagcagagttcaagcaaagatggtaagtatattctttcatttccaagggagaaaagaaatgaaaatacagaatcaaattactaaactaaatattggatgggtagagccaaatagtgtgaactgtacaagttaacaataacattaattaaattaataaaaaatgaaaagaaagaaaggctccggtgtatagaaaggacctgcccgtttctaaaaaaaatcatagaaatgatggaacccacccattttttatatatgtcctaagaaacatcttcacaaaaagttaattggataaatgtttgttataatattttagctgatctaagaaaatttcagaactgcattcattagtagcttaattgttaagtctaagctacaactgaatacaacagccatgaaactatttaagtctttggaaaggaaattgcaactggatggaatagttctagtttctaagaattagaaatgctaacatcgatacagtaacaattgagctgaagaatttagagaagagagaggaagtgtgtccagattcatccatgcatccacataccttttcttccttaagttttctcccttcacacatacataaccaattctttttcttctttgttctgttgctcatacgtagcataggtgaccccaatacagattgagttaattaggttcctctcatcaatttcgtagccttatgccacatgagcagtttatcccatgattcttaagttttgtaattatgttttggaactgagttcattagtgcatagtagtttataatttattagtattcgtattttctttaacgagaaaatcttgaattccattaactgattcacaacgaggttctttttataattattatgattattattattatttgacacaatttttttttttttacttttatatctttggtgtgctactaataaatacgaatttcaatgcaggagctatgtgaggttaatgttgttcttgttgataaaaccagtagcagctacattactcacggaaagaaaatggtgccatatttaaatactgcagtttgtttagcccatgctatcaatcagttgtgtaataggttatgaaatccaacaggaagaacacggattaaaacaatagtgaacattgtatattatgaacttgtgctgatgggctggtccatacacattctgacaagcccgtaattacaaactatataaaccaaatactctacacaatgtattactctgatatcacttgcattttatccttattactcgagctttttttgctgctcaattactcaattttgttcaaaatgttttaaaccataactgtaaaactagtgcagcctttcttaactttgttaggatttaattcaatcatgtgtaattaaaagttttagaatttcacactcttgataaatttcatttgtttaaaaggttcagctgcttcatttgggttggtaacacaaatctagagcaaggaaaaaatctcatatatatgctttcccatcaaaaacaacttcatactcaaaatcacatcgcattttatgacaatgatgataatgtgctatagcgggttgttcttttgaattttatgacttatattgaggaagaataaaaccaaaaaagtaattcaagatgtaaaatgaatatgtcctttatagtagctccatcaaacaactctgctatttatttgtagacaaaaaggtaattaaactttggaggctatacatgaatataacctcacttttattcatcaccttgtctacacacattgatcttaacatacataccccgagtaccaaattttgactacggtagaataatcaaattctaagcagaagaggtaaagttaaagttagcacagtcagtgtgctccaagaagagcgagcagaagccaagccttgaggttgctaaatcaaattgtagcatgttgttctccaactgatttgctccaattgtgattgaagtcattaggtgaaaaccacccaccacagctccaacttggtctgcacttgggtctgatccagcatccccaaaacccaagcaaattacgtcattaaactgcaccattgaattcgcaccaatgatgctccacaccacttcctcattctgcaataccagatttatcgttggcacacccgggcccattcttgaaaacccaatgtcttggttgcaaagcaagtcccaa

SEQ ID NO: 432 - DNA, 3733 bp, Glycine max
  source 1..3733: mol_type = genomic DNA
atgctaaatcttatcgcctgcagcattatttggttgttaaaatggtcaattatctttaggagtatatttttatataaatttttaggactttattttatgtttttgtagttaaccatcctttgttcatttttttattagtaagaattaaagacaagtataatagaatttacaataatttacgcatcatgtttaatcaattgacttagatccccttgatatcctttgttcatttgagcattttgcaaatgaaatttaaccataaaactagagtaaattgaaaaaatggtaaataaagtgtgtcctctacatttaataaactaaagaaataaaaatgtgagattaaattgttaaattggtcagtctatttatttaatttgtttgttttgatttctctattattaaaaaataaattttgttcctatatttgaaaattgatgtaatattatcctttttatcaacaccatttaaatttgacttaaatatatttttcatacctataatatagttcgttttaattttactacctttaaagatttttaactttcaatttactataaaaaaatccatctcaatacattcaaggtttgcaactcctatttatttattaattaaagaaagtatttaaaaaatatactatttactataaaaacaatcatctcaatacattcaagttttacacctcctatttatttattaattaaagaaagtatttaaaaatatactattaaataaaaaatatctcaaatataacttttaaagtattatattaatagttaacaaatttatcaaaatactttctttaaattagtataggaggatattggtaagaggtatttttaaatacttttaactttcaattaaccatgtataaaaaaccgtctcaataaattctagtctcacatcctcggatcctcctatttgttaactgaagaaactagaaagtagtactattcaatatcaagattatactattaacctttttctattttgataaatacttgcacatattaactaatgaacacgtaagtgatgaagtttatccctatgcaatacactagtgtgctcactgaatcaccaatcaccagccatggaaaaggttgaccaagctttcatccaatacccacaacacaggccaaatctcactatcatccaacctgaacacattcccataatagacctctctccaataaccaaccacacagtttcacatccatctcccattgaaggcttggtgaaggagataggaaatgcatgcaaagagtggggattcttccaagttatcaaccatggggtgtccctcactctaaggcaaaacattgagaaagcctcaaaattgttctttgctcagagtttagaagagaagaggaaggttagcagagatgagagttctcccatgggttattatgacacagagcacacaaaaaacattagggactggaaagaagtgtttgattttctagccaaagaccctacttttgttcctctcacttcggatgaacatgataatcgtctcactcaatggactaatccatcccctcaataccctccacacttcaggtatttattagggatcgaaaacatatttgatccttgttttattttttcttgtaattcaactgttaatatgaacaattagttaatgggttgtgtataaaatgatgtgaatattggtagggatataattaaagagtatgttgaagagatggaaaagctgtcctttaagttgatggagcttatagctttgagtttaggccttgaggcaaagaggtttgaggaatttttcatcaaagatcagactagctttcttagactcaactactatcctccatgcccttaccctcaccttgcccttggtgttggtcgacataaggactctggtcccttaaccattcttgcacaagatgaagttggaggacttgaagtgagacctaaagcagatcaagactggataagagtgaaacctattccaaatgcttatattatcaaccttggtgatatgattcaggtaccatttatagatatttgaaagagatgtggtttattcacttcattaatgtactgcagatacaaaatatatacaagtgaactagctaatcacttcctacaattatgggataacacaacaaaatacatgacttgataaggttgttgcagctagcagataatgagaatttaaatgcactgattcgaattcaaatttgtgcttctacaccattaccattataaagactgaaaaattgatgattggggttgtttatgcaggtttggagcaatgatgcctatgagagtgtggaacacagagtggtggtcaactctgagaaagcaaggttttccattccattcttcctcttccctgcacatgacactgtagtcaagcctttggaggagctaataaatgagcaaaacccttcaaaatttaggccatacaaatggggcaagtttcttgtccacagactggatagcaatttcaagaaacaaaatgcggagaatgttcaaacttatcattataagataagagagtagtatattagcaacaccatttagcttatgcttacaaattacattggtatgtagcagcgttgatccaagacaacattactgatgcaaatgactgaaatctaatttgctgctaaatttcctggtgtgcattatgtatgcaaggatcactgaataaaagagctaaagtaccatttatcatgtttatctcaataattgaaattgcattggacttcaattttaatgtttcaatttaaaattaacctctaaacaacctttggaccacattgaatgaattatctgttggaaagttttgtattacactttatatttttttttttaacaccaccgatgtcttttataagaagtatttctgtttgactggaataggcttaaatatgttttgctctggatataacacaattgcataagcttgtgagagacaaaagttttgctctgaatgtataacacaattgcatatacatttgatttgaataataatagaagtcatatgtggttcgcatgaactttttcctattcatgcaaaagcatggtaggaaagtaatccaattaagtggcaaggtgtcatctggcctaaatccacactccctttaccccttctctaatttcctctgaaatctacccattaatcattttaaggagtttaaaattaatgggaaagtaaaagaaaaaaaatgaatttttattcctaaaaaacaaattttctctttttcaataaaataaaaaaaatacatttttatctatattttttttcttttctattttctttcctctcatccaagcatactctggctagacttaaactctgattcactcttacagatcccacaaacacttaggtctcccagcatccaacaaccactctgcatcttcagcactgtgcttcctcaactgttatgatgaattttgagttttgaagcgtgaactctgtgttagtcatggccacagaccagaaatgtcaaatgagtcaccacctacattgtcctactcctttactcgaaaatattcaacatgttagattgccacaataccgaaatatacggcagagacaaattaaatacaaacttcgttggccatgtttgtgcaccatttatagtacttacatcatagtttgatgttagtattctcagtaagtcaaaccacaacagcaactaaaaaataacagcaagtcactatagaaaataaggagacagatacaggagaacaatcttcacac

SEQ ID NO: 433 - DNA, 5834 bp, Glycine max
  source 1..5834: mol_type = genomic DNA
taaatcctttttttttctccactattaaataacatttgataggatattcaccaatcttttttctattcttttacctcagtcaacgtaggaaattacatgtgtgatgtccccagtttccttcggtgtgatgtcccactcgtgatccacatactttagactttggtgggatcctcaccatacatttcccgggaaaagacaatttcacgattcaataacttctgactttaatgccaactgcattaaagtctacattactagctaagcctaatttagtaatttacactatgttcaatttgatttgttctttgtttgattcttctttagctaaacttcaagatgtgttggttaacactgaacatctagctcatgggtatttgataccttctctaatataatttgaagtgggtttgtggcttgaattgaagagtttctatcagttagtcatctttctttgtctctaaggatttgttcaagctctagttgtttgtcaatatatgtatgtatacagtcttctttgtttcgttgttatgtttttgagatgaaccgtgctatgcagcagaacctttttattgatctttagtcaattttggttaataattggagatttcccatttgcatgtttttatcattggtaccttggtggggtttagagtttagattgatgagtgtgtgagacatgtggggaaatgcttctatgagttggatttaggttgcatggcataaagaaaacaaagaggcaaagaagttggaattggagattcagataagataatctacccgttggtctgatatctaaggagttaagtcctttttcaccgtgatttgaggctataaatagctttgttatattgacaaaattccagatccaaggttttatagtcagtgccagggacttcagctgctttgtgttgtgtgggtaagaatattcaattcaataagaaaactatatagttttcaaggtgagtactgtatttgtttgtgtgtaaaaaaggaaacttaaggagaagtacttatagtttgatgggggttaaggctttggctatggcatgaggaatctgaagtatttttctatatgggtatgaataagactatagtttggtttaggagggaccttagaatcgaggacaatcctgcattagctgctgctgctgctgccaaggatggttctgtcttccctgtctatatttggtgtcccaaagaggaagggcaattttatccgggtcgagtgtcgaggtggtggctgaagcagtctcttgcacacttggataagtcactgaaatcacttggagctgaactaatgcttatcaaaactgatagtactcttgaggctcttttggaatgtgtaaatgcaattcaagcaacaaaagtagtgtttaaccatctctatggtaagggtttttgttcaagaagatagctttttatggaattaactttctttgttgaaggctctaaccatatttgtattgcttcctactataatttattttggtgctgttaaaaaatttgaaactccaaaagttgaggaagcaagtaggtttctgtcaaaatattatactgagcttagaacttaacgataaggtgggatattttttttattgtttgctttgtcttctatatatatatattaaaggattgcctagtgcactaggctcccatcactgtggggtcttgggagggttatattatatgcaaccagagggattatttccttgtctagaagccaaccatacggttatgccaagcttcatcttcatcctcattaaataattatattgtttttatttattcatagtgagttttgctgtggaattcgaattgcggtgtacatcaacagggtggaaacctggcattacatgcttaggacaacagaagatatttggataaacctgaagaagaacacaaaactatttaagtttctaaagttaaaacaagatcatctttttctgtacagtttgtactatatggttgaagtggagaatatattatctgattacacatttgatttgacaaaagcagtctgcaattttacaacatgacaccatcttgtcaaaaaccaaatgaatatcatctactgccatcaggcattttatgtaggcaaacattgtttttctttatgtaggcaaaaaatgtccttcttgatttctctcttccccgtttcacaaaactagaaaccatgcaatctatcttgaatactgaataagtgaatagaaaatcatttggttgacacctcatatgatgctgcaaaaattgataaaaatgcctcatagtgagaaaaatttctgatatagcttctcaattcaatgccagatatttgatcactatttcttttcccagatccggtttcacttgttcgtgatcacaacatcaaagaaaagctagtggaacttggtataagtgtgaaaagctacaatggggatttgttgtttgagccatggagtatatacgatgagaccggacatgcttttacaacctttgatcccttttggaacagatgcttgcatatgcaaatgaaagctttttcacttattcctcctcaattaattctagcggaaggtacgactatattcacgctactatggtttgattgtttcttgataatatgataattgatatcaggtatttactggagtcgagatatataaaaaccaatgagaatttgagcatatataatatcttcttgtggcaacaaccagctatgtgatgatgttattctgttattataccatcctgcccacaaattgacatatatttgtacacacgaaacactaagatgagattttggttctctatcttcttctgttgattacaggaaaagttgggaaatgttcaattgaacaactaggtcttgaggatgaatcagaaaaatcgagcaatgcattattaggaagagcatggtatccaggttggaacaagactgacaaggctttaaccgaatttgttgaacagcacctacttcactactccaaaaacaggttaaaggttggtggggattccacttcactcttgtcaccatatattcattttggagaactgagtgtgaggaaagtttttcagttggcacgtaccaagcagatattatgggcaaatgaaggaaacagtgctggtgaagagagtgcaactgtttttctcagggccattggacttagagagtactcgcgctatctttgtttcaatttcccatccaccatagagaagccactgcttgggaacttggcatttttcccttggaagactgatcctgccaactttaaggcttggagacaaggtaggactggctatcctttggttgatgcaggaatgagagaactatgggcaacaggatggatacacaacaaaataagagtcatagtttctagtttcgctgtgaaaatgttgctcataccatggagatggggaatgaaatatttctgggacacacttttggatgcagatcttgaaagtgatatcttgggctggcagtacatctcaggctgcttgcctgatggccacaagcttgagcgcttggacgatcctgcggtatgtcgtgttttcttgactcataagttttactattttctttgtgactctaggatctaaggatctcacattcatattttaatttctactcatttgaagtttgcgtgaccagcataatctatataaaatatcacattatgttgttcaatttgatttttctgaactgaaacttttttctgtgtttgataagacaaaattgcagcacagatcgcttcctagatttatgttgttcttgtggcagtaaaaacattatagattttcatttctgatttttttttaaatgcatttgatatctagagaaatttatccgttcatatttactttcgatttttttatgtggctatctgatttctgcttgacatagttaatttgtatgttcaaattctacagttataaattataattatataccaaatcatgaaccaactatccgaaatctaaagctattaggtgaaggacaataatggttatatattaaaattaagataactaacaaagtcctcttttggtcaagttgtatataatgaggaataaatactactcactcaaagcataagaagattctgacacattagagacagtactcaaacttctctatttttgtctcactttgggaacagattcatggggctaaattcgatccagaaggtgagtatgtacgccaatggttgcctgagttggcaagaatgccagctgagtggattcatcacccttggaatgcaccccttactgtgctaagagcatcaggagttgagttaggtcaaaactatccgaaaccaatcattgacatagatcaggcaagagaacaattgactgaagcaatattcaagatgtgggaaaatgaggcagcttcgaaaggatctggctcagaagagagacatgaagttgttgatgagagtgaaagtttggccattccaaaagttttcttgaaggacaaggtttcgcacatcacttcttcatctaatgatcagaaggtgccaacacttgataatccccagattgatcctcctaatagaaagagaccaaaatgttcggcagaggtcgagcagaagcagaataattcgcgaaatcttagcaaggataccggggtgtcaagcattgatcaagacgtgtcctccacggctgaatcttcatgcaagagggagagttcaagctcttattcattctctgtcccacaataatgttcctcgtcttctaatatcaaatttttttaagtcctttatagcttctcttgattcactaaggcattgtttcatgaaggatggtatatgattttgttggataaaatgcatgctcaagaaccttatcaaactcaggatattctttatctatcctctattaaaggcgtttggttttttactttattttttatggggagatgttaatttgttgttttgttagaaatgttaatccggaggattcgaacccacaacctttttttccttctttctcctttcacccttcccaactaatgggccaaccttatatctccctaaaagtcatttggttgtagatggttttacattatgaggatcaaccctcatgattatgtggtcggttataattagcctatctaattgctaagggttgcgctgatttgcttcagttgctaacttgtttcaattcaattatttatgttacagctagcctttattgatgtttgcatcagttgcatgtcaaaaatgccttttcttacagtgcctaaacaagccctttggactcagtttagacggtttaaactatgttgcagtttggacatcatagaagcatttttgattattttttgtctagctaataaaagtacccatgtctctctagtacagtgtatgtagataacttaattattacagggagtaatgaatgagtgataaggttaaaattagaagccttagggatttctttcaaacacaatttcaaacctaggatttttgtttgttaaaagtatttcttaagtattgggtgataattagtacaaaggtatttttctcaatgtaagaaagtatattttttaagaccaaaaaatgtatattctagatttgcttaaaggaagaagtttacctagagctgaaactattgaaaccgctatgatctttaacgtgatatattatttgaaaatggagatattatttcatatcttgaataataataaaaaaaattgaagggtaaataacttagagggttagagggtgatcaataagatattttaattaatttttaatttttgtattagttgaaaagtttatttgattgtttaataaataaatttttaaaatagtttttaacttttctgagacatgacattttttaaaacactaact

SEQ ID NO: 434 - DNA, 4000 bp, Glycine max
  source 1..4000: mol_type = genomic DNA
tatagtacttacatcatagtttgatgttagtattctcagtaagtcaaaccacaacagcaactaaaaaataacagcaagtcactatagaaaataaggagacagatacaggagaacaatcttcacacactaagaaactcactttgttttgatttcttgggttgtttgttggcttcttgttcaaatacactaatactttagtatttatactatattctgtcaaaaaaaagtatttatactatataaaacacccctgtataaaacactcctgcatacaaatgacacatgtctcgtgaaaatattaatacttcaatctaaacactcttctctaggaaagatactcaaaatacaataaatcaattttaattaatgctacactaaatgatactaacataattgctccactttatatcgaatagtcacaactactatgttggcattgcaaaaaaacaaccaatcacagcaattatgcaataaaaacaaaacattacccatgtgtggcaaattcactattagcaccatttagccattgcaagtatatatggaggtagtttaatgccatcttgtttagatgaaataactaagttgacaactcctcggagaaactggtgaaacacatccctttgaaaataatcataaaattacttaaaagttaaactaatttgtagctatctgaactctttaaaaaattatttataggttttaaattaaaaaattctaattaattgaacccttaaaattacaattttgttataattaaatctctatagttcataaaactgtcataaattatcattttctgataattttaagctgtcagaaacaaactttaaaattcaactacaaaaatttcacaaaatcaataactcaattacaatttttactaatttgaacataattaaaaaatttcaaatactgtaagacctgcatattaatttaaccttactttaataagattaatttaacctttctaaatatttttttggtattaaccttactaaaattgaaccttaagagaatcatggttcaccaaaaggctttcatatattcggtctactagtgaaagttctctagcaaaagccatgggagaggtcgacccagctttcatccaatacctacaacacaggccaaagttctctaccatccaacctgaagacattcctgtgatagatatctccccaataaccaaccacacagcttcagatccatgttctattggaggcttagtgaaggagataagaaatgcaagcaaggagtggggtttcttccaattatcaaaccatgctgtgcccctcactctaaggcaaaacattgagaaagcctcaagattgttctttacacagaatttggaggagaagaggaaggttagtaaagatgagaacaataccaccggttaccatgacagagagcaccccaagaacattagggactggaaagaagtgtttgatttcctagccaaataatccactttcattcctctcacttctgatgaacatgatgatcgactcactcagtttgactaatcaatctccttaataccttcaaaatttcaggtaactcatcttcacttttggaatagttatagacataaacagcaaatttatggtgaaaacagatgtatcttttctttgtatattttaaactacgctacaatatatttttagtccttgtactttgatcaatttagtgagtccgtgaactttagaaaaacagtgatttttttgttcttcttcacagacggttttcattttcaccataaggagggacgaaaaccaatattttttgaaaagtttagggaccaacttgatcaaagttgaagttcagatactaaaacaagttttaccgaaagcacagaactgaaaacatatttcactctttaaactatgttctaaatgatgtccatatgagcagggttataatacaagagtatattcaagagatggaaaagctgtgctttaagctgttggagcttatagctttaagcttaggtgttgaagcaaagaggtttgaagaacttttcatcaaagatcaaactagttctattctactcaactgctatcctccatgcccttaccctcaccttgctcatggcgttggttgacacaaggaccctggtgccttgaccattcttgcacaagatgaggttggaggacttggagtgaaacgtaaagctgatcaagagtgaaaccaaccccagatgcttatactatcaactttggtgacattattcaggtacaacttcagtagcaatattaagactggaaacttgaaattttattgactcgtaatctagttataagaaacagccaccacctaactcactcaagaaagttaactttaagggaagaggactgcacatgtcatataaggacaaccatattgtagtttctgttgttggttcgtctggaattggatttggattctttaagcaaagtcttaagcaaagtctcaagtttgagtattgtggatgaaaaaacgtgtctaaaagaggagacctactaatagtggtctgcccagcttcccaggagagattagtcactaacaaaagtataaatacttcacaccaatgtcatgatgaccctaaaaaaaacatattctaatctttgagtttatgaactatttattcccgtaattagtggagagaatttttatttgaggattggagttgtttgtgcaggtttggagcaatgatgcatatgagagtgtggaacacagagtggtggtcaactctgagaaagaaaggttctccattccattcttctacctttcgcatgaaactgaggtcaagcctttggagaagctgataaatgagcaaaacccttgaaaatataggccatacaaatggggcaagtttctcacccatagaaagaataccaatttcaagaaacaaaatgtggagaaccgtcaaatttatcattataagcttgcttaaaagatagtatagtgacagtataatttagcttatgtatgttgggtataatgtgttgaagcagattgattcaagacactgcttctgatatccacggcaattatatttgctgctaaagttacttgtttgcattaagtatagaactatagaagtatagcccaataaaagaaaactaaatatcgtttattaattttcaagaatcaagacaaaacttgaaattacattagtttttaaatttcctattttaacattttttgttccttgtgtatctttttgttaattagattcttgcggattgtaaagtgtaaactatttctttattactattaagtagccttctccatcattagtttaatgaacaagttttatactactgtgtttatgaggttgatgtaaatcaaatcacaatcaatattattacatgattaaacaatagcaagcgttcaaaaatagtttgtggaactttcactgaatggctttttgttggactgctgagtctgaattcaataaattatgtgttggttgcaagagtttggatgcattattatctatcagccaaatttcaatcactttcaaagcatttttttaaacaaaatagtttttttttttaaatccatttctccctaacaatcttttttttttttactttaaaaaatgacgatacttacataatacttttttttacagtttttggctatcaattttctttactttttttctttctagagaggacatattactgtttatttaatttatttaactggatcaagaagatataaaaaaaatgtttgtacactacttaacaaatcaattttttttaaaccacacttatctttcactaaagcttatttatttaagttaaataagactcataaactgggaagctttccaaatcaatctacaaattgaaaaaacatagtaacgagagttattaatatcttttttttaacttggattttagtttctttttaattatttttgagtaatcaatatatattttctaggatcatcccatcttatttgatttcaagactatttaattactttgaaagttacgtggtatatctgcacatg

SEQ ID NO: 435 - DNA, 6503 bp, Glycine max
  source 1..6503: mol_type = genomic DNA
gtgccaaaagaataaaataaatagataatttgaacaaaataaatagataatttgaacaaaataaacgtgtgttagtaacattttggactaaaaatacattttgttacgttttcgtgttttttcaatttgatcatttatattttaaaattttcaatttataaataaatcattttggtcatattcatccacaatgtcaaaaatattaacaagaatgtccaatatagtgacgatgtttttccattaatgttgaatggatttatgatatgacgatgatgcttttaaaatgattttattttaatttacgttttaatgtttccaatttagttagttaatttttaaataattccatttttgttcaattttatgctcatttcatatataaacccgttttgtacagtttgcactttatgaccttatactaaaactgccaaattacttcaaaattctttggatttaggtacaatttagcataatgcacaatatcatggtacggctatagaaaccataattatacatttataatatttaaaagatgtaacttacataatagaaattaagaaacgaaatttgtacatttgtgatacttatcaaactaaaatttcaatcaagcccatgacttaaaacgttatttgaaataatatttttttataacacatatttttaacttattatatacatatatatatatatatatataaatatttattcaaattttttaaacatgttgttttatatttttaattattttaacagttaattttattacatatttataatttaataaattaatttaaaaaaatttcgctatcaacttttcgagcaaacttttgaatcttaaattaatttttttgaataatagcttgcatctttataatatatattcactctctttctctaaatgtaactattgcggtattttaattttaattttttctgatcctctcttctatgtacttgtttttagtacatttgtctcgtttgtaaaaatatcagcatatcatcattcattcctaccaaaaacgcccttatagctccctccccataacaagaaactcagcggttaatggtggacggctgtttccgtcgatgagaccacaactccactgtgtaacaaaataaaataataaactccttcccttgaccggtgaccgtaccaaccggttcgaagttggaaccatgagagagaaaatgtttatatattccatcatctcataaattgggtctgcactttatgttccttttggatcctctcacatctctctttctttctccggtgtcatggaatccggtagtgcccgatgtttatattccctccggttctgaaatcatcaaatgcaactaccaaacctcgagaagcttccttcacacacttccttctgtgagtttccttctcttcttccttctcggtcgccggacaacttctccggcgtaaccacggttaccggagtatcttctaattattttttccctctctttgcttctattccgcgcagtttccttgttcttcgaacaagctctttctcattccatcaccacaacttccgatattgcatcttcaactgttttggttacattttacgcgtaataactgattgtttctttcgattggaaccatcgctcgaagagaatctccggtgacgtcgaagcaatattagtttactgtatgtattagttcggattaataataataaagcgcataagtgataacaacaacaaaaaaagaatatctgagttgaaaaattgctagaagaagattaaacgcgatgttggatcttaatctgactgccgagtcgactcagaacgacgagttgctggtgctgttggacaagtttcctgaagcttcgtcgggaacttcgaattcctccatcgtgaatgcggaggggtcgagcaacgaggactcgtgctccacacgcgccggcgacgtgttcaccttcaatttcggaatccttaaggtggaagccgcgaatgacgtcgttgccgcggcgacgaaggagctgtttccggtgagctcggagaattggcaggggcagagttcgacgtcgttgtttcaggcgaggaagagtttgatggatctctcactagatcaacaacacggggaggtgaaggtggtacaggttcagccacagcctaaggtgaagaagagtaggagaggtccacggtctcggagctctcagtacagaggagtcaccttctaccgaagaaccggaagatgggaatcgcatatctggtttgttcacttcacattgttcaatcaagcgtttcttgtatatttcactattttgcctttttttattaggtttttgttggaaggaattttaattttctgtggaatttgcatttggttaatcatatggttgaattgaattgcatctgaccttaatttgttgtttggtgtagggattgcgggaaacaagtctatttgggtatggatttgtatttttgactaattattgtttccatttatatttgaatttattattctgcgatttgctatttttagcgtttttttattagattggtattgggcattgtaggtggatttgacaccgctcatgctgctgctaggtaaaactttttggacatattttaaatattctttatcgtagttttattttatttttttaccaattaaacctgttacctgtccttcgtttgattggtatcttccttaattgacttggaaatttcaaatttagggcctatgatcgagctgctattaaattcaggggacttgatgctgacatcaattttaatctcgttgattatgaggaggatctaaaacaggttggaacacgaataagcttttggtgaatttgaatctagatggagcttgtgattggttttttactggtttgttaatgatgggcagatgaagaatctttccaaggaggagttcgtgcacatactccgccgccacagttccggtttctcaagggggagttcgaaataccggggagtgacacttcacaaatgtggccgttgggaagctcgaatgggacaattccttgggaaaaagtgaggacctacttttttttatgttaactataactgatgttatggtttgtcatgtttataggattagatattagtacgaattattagagatattagatattagtacgaattcaagtacctattgatttcagttgtaccaatacctattggtacaactgaagtacgaattcaaagcgaattgttttcggtttggtagtcaaatgggtctttactcttctggctttttccatgtttggaggaacatgtctaggatgcctgtttcacagaaacagttggcagaggtgtttttgttgttatagagattgcaatgctttcgtgcaggtatatatatcttgggctattcgacagcgaagtagaagctgcaaggtcctaattatacatgaatttcattctacctgcactgaattttttaccctgaattatcaaagctctttacggttccaaccaacatatgtctcccttttgattttctggaaatcagggcttatgacaaggcagctatcaagtgcaatggaagagaggctgtgactaactttgagccaagtacatatgagagcgagatgaaacccgaagctattaatgaaggtagtacttcatggcatgatactctagagatatattttatttacaattgattgtcagtgttaaaaagaaatatgttcaatgtgaaatgaggtttgtatttgtcttcaacacaggtggcagtcacgaccttgacctcagtctgggcatagcgaccccaggacatggtcccaaagaaaacagggggcatcttcagttccagtccatcccttacaacatgcatcctggaagaagttcaatggtatataattaaactttacatcttcatttactttaagcacggaagcaaaggtttatatcacattataactcttcataggtcatggatgatagttattggacatattttttaatggaagcagtgttcttttgtcctttgtgggttcacttgtagctaattaccgcctacttactttactttgacattgttgatctttatgaaacatgtggattttggaattgttttgtaattgtaactacctcacattgatgtcttaatagtggtcatgataggttgggttctctttgtttgcagatggagactaatattaattccgttattggtgatccttctttgaaaagactggttgtaactgaagagcgtccttctgtgtggaatgccgcatattccactttctttcccaatctggttagtttcaaatgcctgttacaactgattacttattttttttactaaatgcttcaaataaacattcaagataatttccgtttttactaaatgcttcatataatgcgtccttctgtatgaagcattcatgataatttgcttttgattttgacataacattcgaagttgagttttatgctctgcgaatcctctttacatactgatctttatcaacttttggtgcaatctaagttatcggggaatttgtctccatttagtatatatttgatgttccatgtcacttactcttttttgacatgatgagttgttcccaaatatgttaaaaaaatagatcttaaagtggtgagtctataaataggtccttctaatacatagatatattcttggtaatgagctgaatttggaatatggctaataattcattgacaaagaccacgagtccatgacagaattaggataatatttcggtcaacattccttttcaagttcgtgtggaggtgattctgggggatgatgtagcattaacattaacattgtgcatcaatacaacttgataccaccattggcgtgttttcttgtataggaagatatttaattatattgttgaaatatttgacaggaaagagcagagagaatgggcacagatccttcaaaaggagtcccaaaccccaactgggcgtggcaaacacatggccaggttactgacaccccagtaccaccgttctctactgcagcatcatcaggattctcaatttcagccacttttccatcaactgccatctttccaacaaaatccatcaactcagttccccatagcctctgtttcacttcacccagcacaccaggtagcaacgcacctcaattctataactattacgaggtgaagtccccgcagccaccgtcctagcctatcttgtaatacaagtacaaatggttaatcgaaacaaccttttgcgcttaaaactcatcgtataattctgttactgattgatgtatacttagatacgacatctgattgcacttcttggtttaacaaaccattatgcacaaatgatgtatgaaggaaaaagctctttttgagtgctccagttctcttaggattattttttcatcaaaattagtatcaagttgtcagaattcgtgtattcacccaccaattttgtgaatatatgcctttgtgtatgcaaccctgaaaatgggaggaaaccaaaatatgttgcatttttcattgaatatttcacaacttgatttgactaagtcttacatattgctacgatatttgggagtgtaagtggtaatcccaccacacaagttctgaagttcaattctcaaaacgacagtaaaacttttttttttctttcctgtttgcatgctttagggctcggtactttgttgttgctcgtggaatgtttggatgtgataaaagaaaacagaggagaaaagaaaaaatacagataattcttttattctacagagaaagtgaaaagaaaaaagagatgtctttcaaaagaacaatccgactcaatttctttctactatattcgttatgacttcactcccactaaatttagtttttatatttttttaatatcaatttttttacctggtggtcatttagattttggttactaccattaagtgtattgctagatttttttatactcattatattttagaatttttactaatctagataatcattttttactaaagattagcagtgtgtttagtgcatactttttttaaaaactagtattttttaaatagctgttttttaaaattacatcttatatattcagtaaaaatattgaagtgatgaaaatacttatatggtaatttttttccatcataattcaaaagtagaattttgaaaattatgattaatttaccaaattcttttagcttttccccctaattaaaatttactataaaaatattttttttaaataattaacatgaaatatgttaccctaaaatcactttttacttaatatatccaaacagaaaatttattttaaataattaactataaccataattaattgtaatttaaatatttttcgacaattactttatacactcattatacattaattcttatgattttcaacatttttttaaacagaaagtagataaaagaagattgaattgtgtttatgtggagtgagaacgagcagtgggtgacagaagtcattgcagatcacataacatacttgatattggtcagagagcagcattataattattattcaagtaa

SEQ ID NO: 436-455 - skipped (20 entries)

SEQ ID NO: 456 - protein, 234 aa, Glycine max
MFTLNHSSDLYHVSPELSSSLDTSSPASEGSRGVAFSDEEVRLAVRHPKKRAGRKKFRETRHPVYRGVRRRNSDKWVCEVREPNKKTRIWLGTFPTPEMAARAHDVAAMALRGRYACLNFADSAWRLPVPATAEAKDIQKAAAEAAQAFRPDQTLKNANTRQECVEAVAVAVAETTTATAQGVFYMEEEEQVLDMPELLRNMVLMSPTHCLGYEYEDADLDAQDAEVSLWNFSI

SEQ ID NO: 457 - protein, 174 aa, Glycine max
MEDRDHCCSNNSTMITTTKKRTGRRSPTSDKLKNQHREKQSMKPYRGIRMRKWGKWVAEIREPNKRSRIWLGSYTTPVAAARAYDTAVFYLRGPTARLNFPELLFQDDDQEGSDSVQHGAAGNMSADSIRRKATQVGARVDALQTALHHHAPSTNSLNLKPDLNEFPKLEELQD

SEQ ID NO: 458 - protein, 368 aa, Glycine max
MDNNNDFWKFSDQLRLESGLANLSLNDYSIWSNSYSSKRPDQRRNFDVKGSDFNNNNNSSKAFDDDFNDGWKITNSNGPLFSMPHNNNNNTLEVGGFNKGGGIYSNTNTTISSYHPNNLNNNAFGGFNKGIYSNTTSSPYLNNNHHHLDDNNNLNRNNLKGYKTYFKGEDQFHTPKSAKKKNTTNNTNNKKHGDNTNNNDGTKTGAEKKFKTLPPSESLPKNETIGGYIFVCNNDTMAENLQRQLFGLPPRYRDSVRTITPGLPIFLYNYSTHQLHGIFEAASFGGSNIDPTAWEDKKCPGESRFPAQVQVITRKVCEPLEEDSFRPILHHYDGPKFRLELSVPEALSLLDIFANQNSFDDIFKAIPA

SEQ ID NO: 459 - protein, 512 aa, Glycine max
MWLASFRSLLCKCFIPRWLGLCRLIKTTLIPLERRMLLAMLLNLVLASFVFLSFIRDGSAGITSSFIRSEWPAVDIPLDHEAFAVPKGYNAPQQVHITQGDYDGKAVIISWVTTEEPGHSHIQYGTSENKFQTSEEGTVTNYTFHKYKSGYIHHCLIEGLEYETKYYYRIGSGDSSREFWFKTPPKVDPDSPYKFGIIGDLGQTFNSLSTLEHYIQSGAQTVLFVGDLSYADRYQYNDVGLRWDTWGRFVERSTAYHPWLWSAGNHEIDYMPYMGEVVPFKNYLYRYTTPYLASNSSSPLWYAVRRASAHIIVLSSYSPFVKYTPQYMWLKEELKRVEREKTPWLIVLMHVPLYNSNGAHYMEGESMRSVFESWFIEYKVDVIFAGHVHAYERSYRYSNVDYNITGGNRYPLPNKSAPVYITVGDGGNQEGLASRFLDPQPEYSAFREASYGHSTLEIKNRTHAIYHWNRNDDGKKVPTDSFVLHNQYWGHNRRRRKLKHFLLKVIDEVASM

SEQ ID NO: 460 - protein, 254 aa, Glycine max
MKMKVLVFFVATILVAWQCHAYDMFPLRMNTGYGARTPEVKCASWRLAVEAHNIFGFETIPEECVEATKEYIHGEQYRSDSKTVNQQAYFYARDLEVHPKDTFVFSIDGTVLSNIPYYKKHGYGVEKFNSTLYDEWVNKGNAPALPETLKNYNKLVSLGFKIIFLSGRTLDKQAVTEANLKKAGYHTWEKLILKDPQDPSTPNAVSYKTAAREKLIRQGYNIVGIIGDQWSDLLGGHRGESRTFKLPNPLYYIQ

SEQ ID NO: 461 - protein, 463 aa, Glycine max
MASKKQEERAEAAAKVAAKELEQVNRERRDRDFGVVAEQQQQHHQEDQQKRGVIGSMFKAVQDTYENAKEAVVGKKEATNNAYSNTEVIHDVNIQPDDVSATGEVRDISATKTHDIYDSATDNNNNKTGSKVGEYADYASQKAKETKDATMEKAGEYTDYASQKAKEAKKTTMEKGGEYKDYSAEKAKERKDATVNKMGEYKDYAAEKAKEGKDATVNKMGEYKDYAAEKTKEGKDATVNKMGEYKDYTAEKAKEGKDTTLGKLGELKDTASDAAKRAVGYLSGKKEETKEMASETAEATANKAGEMKEATKKKTAETAEAAKNKAGEIKDRAAETAEAAKNKTAETAEVTKNKALEMKDAAKDRTAETTDAAKQKTAQAKENTKENVSGAGETARRKMEEPKLQGKEGYGGRGDKVVVKVEESRPGAIAETLKAADQIAGQTFNDVGRFDEEGVVNVERRKK

SEQ ID NO: 462 - protein, 666 aa, Glycine max
MAGSWARRSLIVLAIISFGCLFAISIAKEEATKLGTVIGIDLTTYSCVGVTDAVEIIANDQGNRITPSWVAFTDSERLIGEAAKIVAAVNPVRTIFDVKRLIGRKFEDKEVQRDMKLVPYKIVNKDGKPYIQVKIKDGETKVFSPEEISAMILTKMKETAEAFLGKKINDAVVTVPAYFNDAQRQATKDAGVIAGLNVARIINEPTAAAIAYGLDKKGGEKNILVFDLGGGTFDVSILTIDNGVFEVLDTNGDTHLGGEDFDQRIMEYFIKLIKKKHGKDISKDNRALGKLRREAERAKRALSSQHQVRVEIESLFDGVDFSEPLTRARFEELNNDLFRKTMGPVKKAMEDAGLQKSQIDEIVLVGGSTRIPKVQQLLKDYFDGKEPNKGVNPDEAVAYGAAVQGSILSGEGGEETKDILLLDVAPLTLGIETVGGVMTKLIPRNTVIQPKKSQVFTTYQDQQTTVSIQVFEGERSLTKDCRLLGKFDLSGIPPAPRGTPQIEVTFEVDAERGILNVKARRAKGTGKSERSPISNEKGRLSQEEIERMVREAEEFAEEDKKVKERIDARNSLETYVYNMKNQISDKDKLADKLESDEKEKIETAVKEALEWLDDNQSMEKEDYEEKLKEEAVCNPIISAVYQRSGGAPGGGGASGEEDEDDSHDEL

SEQ ID NO: 463 - protein, 274 aa, Glycine max
MCTALKTNYQLSEEIGRGRFGTIFRCFHPLSNEPYACKLIDKSLLHDSTDRDCLQNEPKFMTLLSPHPNILQIFHVFEDDQYLSIVMDLCQPHTLFDRMVDGPIQESQAAALMKNLLEAVAHCHRLGVAHRDIKPDNILFDSADNLKLADFGSAEWFGDGRSMSGVVGTPYYVAPEVLLGREYDEKVDVWSCGVILYIMLAGIPPFYGDSAAEIFEAVVRANLRFPSRIFRTVSPAAKDLLRKMICRDSSRRFSAEQALRHPWILSAGDTAELT

SEQ ID NO: 464 - protein, 521 aa, Glycine max
MLLELALGLLVLALFLHLRPTPTAKSKALRHLPNPPSPKPRLPFIGHLHLLKDKLLHYALIDLSKKHGPLFSLYFGSMPTVVASTPELFKLFLQTHEATSFNTRFQTSAIRRLTYDSSVAMVPFGPYWKFVRKLIMNDLPNATTVNKLRPLRTQQTRKFLRVMAQGAEAQKPLDLTEELLKWTNSTISMMMLGEAEEIRDIAREVLKIFGEYSLTDFIWPLKHLKVGKYEKRIDDILNKFDPVVERVIKKRREIVRRRKNGEVVEGEVSGVFLDTLLEFAEDETMEIKITKDHIEGLVVDFFSAGTDSTAVATEWALAELINNPKVLEKAREEVYSVVGKDRLVDEVDTQNLPYIRAIVKETFRMHPPLPVVKRKCTEECEINGYVIPEGALILFNVWQVGRDPKYWDRPSEFRPERFLETGAEGEAGPLDLRGQHFQLLPFGSGRRMCPGVNLATSGMATLLASLIQCFDLQVLGPQGQILKGGDAKVSMEERAGLTVPRAHSLVCVPLARIGVASKLLS

SEQ ID NO: 465 - protein, 294 aa, Glycine max
MEDMNNMSGEITLPGFRFHPTEEELLDFYLKNMVVGKKLRYDVIGFLNIYQHDPWDLPGLAKVGEREWYFFVPRDKKHGSGGRPNRTTEKGFWKATGSDRKIVTLSDPKRIIGLRKTLVFYQGRAPRGCKTDWVMNEYRLPDNCKLPKEIVLCKIYRKATSLKVLEQRAALEEEREMKQMVGSPASPSSTDTMSFSSPQEEQNMPLPLLQHVLKKESETEDMVVPKQEKITNQLVLKDTNKSTCGTSLQMPFGKEKLPDLQLPMLSDWTQDTFWAQLNSPWLQNFTPTNILNFY

SEQ ID NO: 466 - protein, 159 aa, Glycine max
MEEAGLGDCCSSNTTITRKSEKRKQQHQQQEKPYRGIRMRKWGKWVAEIREPNKRSRIWLGSYATPVAAARAYDTAVFHLRGPSARLNFPELLSQDDDVSTQQQGKMSADSIRQKATQVGARVDALQTALQQSSSTHSISSSHVSYEKPDLNEYPKPED

SEQ ID NO: 467 - protein, 612 aa, Glycine max
MATLKELLPPAKSSSTAYYDHTNDPWFKQRFSSEEEEKSAAAAAAKQKPVPPYLKRAGFVPRKIEDFGDGGAFPEIHVAQYPLDMGREKSGAKPGSKILPVTVDANGNVAYDAIVRQNENARKIVYTQQKDLIPKFLKNDEDDDDVVSDDEAQKQIEETMQETKAALEKIVNVRLSAAQPKNVPKQNSDAKYIKYKPSQQSDAFNSGAKERVIRMVEMPVDPLEPPKFKHKRVPKASGSPPVPVMHSPPRPVTVKDQQDWKIPPCISNWKNPKGYTIPLDKRLAADGRGLQEVQINDNFAKLSEALYVAEQKAREAVAMRSKVQKEMMLKEKERKEQELRALAQKARSERIGGERIGVVPAAPPAVAVDEDDMRVDYEHEKENPRERDRERSFVKESREEKEERMQREKIREERRKERERERRLEAKDAAMGKRSKITRDRDRDISEKVALGMASTKPGTEVMYDERLFNQDKGIASGFATDDQYNVYEHGLFTAQPTLSTLYRPKKNLDDETYGGADEQLEKIMKTDRFKPDKGFAGASERAGPRDRPVEFENEQTDPFGLNHFLTEVKKGKKAMEKVGGGGTMRASAGSSMRDGNEGGSGRTRIGFERGH

SEQ ID NO: 468 - protein, 198 aa, Glycine max
MAKPSSEKPEEHSDSKYYKGVRKRKWGKWVSEIRLPNSRQRIWLGSYDTPEKAARAFDAAMFCLRGRNAKFNFPDNPPDIAGGTSMTPSQIQIAAAQFANAGPHEGHSGRPEHPPMESPSPSVSEGTIQTDSDVPTLNGSVTDLFTPVGSSGYASDYGIFPGFDDFSGDFYVPEMPNVNYGEENGEGFIVDESFLWNF

SEQ ID NO: 469 - protein, 261 aa, Glycine max
MGRAPCCDKSNVKRGPWSPDEDATLKNYLEKHGTGGNWIALPKKAGLKRCGKSCRLRWLNYLRPHIKLGGFTEEEDKIICTLYDTIGSRWSFIAAQLPGRTDNDVKNHWNTKLKKKFLAGNTSSTAATTSNNNVTFSNTSYSDQVKTLVLDHQKLNSADNWFDYSYNVLELEQTPIPVPFPMSQELEAFNYTAGSISCSAPPPSKEVSMLSNADNHTLWFGYDHASEDDPNLLEFVLDDDLLNHGFVSQDKSCSQVGPPSG

SEQ ID NO: 470 - protein, 225 aa, Glycine max
MNNPSSPSPCAAFADFYEQWFEELQSLMQQLRGEGRKEEVMEKVMWHHQNYYVAKSAAAEKDPLNVFLSPWATTLERSLHWITGWRPTTAFHLIYTESSLMFESHIIDILQGLRTGDLGDLSPSQFRRVSDIQCDTVKEENAITEELSEWQDSVSEMMGPGANINDKIGRLVCIIKKADDLRLRTLRSVVGLLSPQQAIEFLIASAELLVGIRGWGLNHDRPRGR

SEQ ID NO: 471 - protein, 359 aa, Glycine max
MESDLSWERNTLINELIQGMEVARKLKADLKLPYSVDTRDLLLQRILSSYEKALLILRCSNASTSELQGMNQATPTLLPESPLSVHGSPLREDVHGAIKDHHNSKKRKITPKWMDRVRVSCESGLEGPHEDGYNWRKYGQKDILGAKYPRSYYRCTFRSTQGCWATKQVQRSDEDPTMFDITYRGNHTCSQGNNAVLPPKSPEKHEKPAHSHNIDIHHAQASQESLAKFRSILSVNTDNLDNGDMAYAFTFPSTSFGCMKQDNHSLIPLALENDSFLSDLYQTHLLSPTTPESNYFPSPTFQMNEFDGIYNRSHSKSDINEIISTNTSATNSPIPDFNFSLDPVEIDPNFPFNTPGFLC

SEQ ID NO: 472 - protein, 789 aa, Glycine max
MHPFCCVSAISDQASPVKPSFADFAMPPLPAAAAATTVRSDSAPRHSHKHSHSHSGSQREQPVVDVKINDLVGNGISGILYKWVNYGKGWRPRWFVLQDGVLSYYKIHGPDKIVVNPETEKGSMVIGEESMRRITRNRNSYPSQHIRKPFGEIHLKVSTIRESKSDEKRFSVFTGTKRLHLRAETREDRVAWMEALQAVKDMFPRMSNSELMAPVDNVTVSTEKLRVRLMEEGVSEAAIQDSEQIMRTEFAALQSQLVLLKQKHSALIDTLRQLETEKVDLEDTVVDESQRQWNGEEASSRLAQEKFSEGTASESEDDNERNDAAEEETDDDDNAFFDTRDILSSSSFKSNGSDYRVSSFSSDDEGFYAFESEDDIDPSIRYVGTNYPHVKRRKKLPDPVEKEKGVSLWSMIKDNIGKDLTKVCLPVYFNEPLSSLQKCFEEMEYSYLLDQAYEWGKRGNSLMRILYVAAFAISGYASTEGRVCKPFNPLLGETYEAHYPDKGLRFFSEKVSHHPMIVACHCEGTGWKFWGDSNLKSKFWGRSIQLDPVGTLTLEFDDGEVFQWSKVTTSIYNLILGKLYCDHYGTMRIQGNQEYSCKLKFKEQSIIDRNPHQVHGIIQDSNGKTVSTLFGKWDESMHYVNGDYTGKGKGHESLSDARLLWKRSRAPKFPTRYNFTRFAITLNELTPGLKEKLPPTDSRLRPDQRYLENGEYDMANAEKLRLEQRQRQARKMQESGWKPRWFAKDKASGSYRYLGGYWEARQRGNWDSCPDIFGQIPSVHISDEGQITF

SEQ ID NO: 473 - protein, 581 aa, Glycine max
MFDGVPDQFHQFITPRTSQPLHLPFPLHASGTPNTTFPSNFDPYNNPSHQLPLQPNNLLHPLHHKDEEKEENTTTVPMNFEIQRDQRQQLPELIDPWTTDEVLTLLRIRSSMESWFPELTWEHVSRRLAELGYKRSAEKCKEKFEEESRYFNNDINYAKNNNNSTSNYRFLSELEQLYHQQGSSGDHLEKMTQPPLQKQGRMDHHALELEEEEGDSRNVIVDASVTKIQSDEALAVEKITKDRKRKRSDRFEMFKGFCESIVHKMMTQQEEMHNKLLEDMMKRDEEKFTREEAWKKQEMEKMNKELEMMAREQAVAGDRQAKIIQILNKFSATTSSPASHTLKKVNTHISQNPNPSQTENPTLSVAQDTLIPSTSSTSTPAPAPPQNPSSCSLNSQNNNHINNNIPVEKNSILNKGSSSNEKDDVGRRWPKDEVLALINLRCTSVNNNNNNEEKEGNNKVPLWERISQGMSELRYKRSAKRCKEKWENINKYFRKTKDITKKRSLDSRTCPYFHQLSSLYNQGKLVLQSESHLNNTPPDQNPEQVKPDQTTQAHESSSQVGSGSGFSVQQQQVPSLDFDQF

SEQ ID NO: 474 - protein, 268 aa, Glycine max
MAAATQLHLPPGFRFHLTDEELVVHYLCRKCASQEIAVPIIAEIDLYKYDPWDLPGMALYGKKEWYFFTPRDRKYPNGSRPNRSAGTGYWKATGADKPVGKPKPVGIKKALVFYAGKAPKGVKTNWIMHEYRLADVDRSVRKKNSLRLDDWVLCRIYNKKGAIEKQQPAPPPPSGVHKIECYEMEDVKPEYTAADCLYFEASDSVPRLHTTESSCSEQVVSAEFASEVQSERKRQGNSEFSYNYMDATLGNNQMSPLQDIFMYLSRPF

SEQ ID NO: 475 - protein, 345 aa, Glycine max
MCGGAIISDFIPAAAIAGSRRLTADYLWPDLKKRKSDLDVDFEADFRDFKDDSDIDDDDDDHQVKPFAFAASSRLSTAAKSVAFQGRAEISANRKRKNQYRGIRQRPWGKWAAEIRDPRKGVRVWLGTFNTAEEAARAYDAEARRIRGKKAKVNFPEAPGTSSVKRSKVNPQENLKTVQPNLGHKFSAGNNHMDLVEQKPLVSQYANMASFPGSGNGLRSLPSSDDATLYFSSDQGSNSFDYAPEISSMLSAPLDCESHFVQNANQQQPNSQNVVSIEDDSAKTLSEELVDIESELKFFQMPYLEGSWGDTSLESLLSGDTTQDGGNLMNLWCLDDIPSMAGGVF

SEQ ID NO: 476 - protein, 343 aa, Glycine max
MEYRLLPIFTLLNLALVAIHAALPPEVYWKSVLPTTPMPKAITDILYPDWVEEKSTSVNVGGKGVNVHAGKGGGGTNVNVGGKGSGGGVNVHAGHKGKPVHVSVGSKSPFNYIYASTETQLHDDPNVALFFLEKDLHPGTKLNLHFTTSSNIQATFLPRQVADSIPFSSSKVEVVFNKFSVKPGSEEAQIMKNTLSECEEGGIKGEEKYCATSLESMIDFSTSKLGKNVEVVSTEVVEDKETGLQKYTVAPGVNKLSGDKAVVCHKQNYPYAVFYCHKTETTRAYSVPLEGTNGVRVKAVAVCHTHTSEWNPKHLAFQVLKVKPGTVPVCHFLPEDHVVWVPK

SEQ ID NO: 477 - protein, 219 aa, Glycine max
MASNHEEVILLGKWASPFSNRVDLALKLKGVPYKYSEEDLANKSADLLRYNPVHKKVPVLVHNGNPLPESLIIVEYIDETWKNNPLLPRDPYERALARFWSKTLDDKILPAIWNACWSDENGREKAVEEALEALKILQEALKDKKFFGGESIGLVDIAANFIGYWVAILQEIAGLELLTIEKFPKLYKWSQEFINHPVIKEGLPPRDELFAFFQASAKK

SEQ ID NO: 478 - protein, 293 aa, Glycine max
MASSSIKHTHHLNRTKLFMKEETLLKKKHHYPKIIRIRVTDADATDSSSDDDEPSMSSTRRRVKNFVNEITIQGGGGGGGDVNVVSKKRRFKSGAGAPLCRRKTGAKKFRGVRQRPWGKWAAEIRDPSRRVRLWLGTYDTAEEAAIVYDNAAIQLRGADALTNFITPPPENRKTGYCSGEESRNNDDLRSPTSVLGRCSVSEEAVTANDVFGGSSECEYSCVSESVFPIPNEVVFDFESTLDMFDEGINNVVAETSIFLAEDLDLGFTSWHRECDNFQDIGGDLFVWDPLVAL

SEQ ID NO: 479 - protein, 449 aa, Glycine max
MGSHQQEPWLLENGKPRVLTKETRHGRSAHRMSSTSLRKKSSRTLVSKVPCATLRNLLSNLQEVILGTKLSILIPAIPAAIVAECFGFGRPWIFILSLLGLTPLAERVSFITEQVAFYTGPTVGGLLNATCGNVTELIIAIFALSSNKIAVVKYSLLGSILSNLLLVLGTSLLCGGIANVGVEQKYDRRQADVNSLMLLLGLLCYLLPMLFKYSGASAALTVDPSLHLSRASSIVMLIAYVVYIVFQLWTHRELFEEEDDGKDGEDGSEEQAVIGLWSGIAWLVGMTVFIAVLSEYVVDTIEDASDSWGLSVSFLSIILLPIVGNAAEHAGAIIFAFKNKLDISLGVALGSATQIAMFVVPLCVIVAWIMGINMDMNFNLLETGSLALAIIVTGFTLQDGTSHYMKGLVLLLCYIVIGACFFVQRTPFNNQADVTNITLKPATNAVLSA

SEQ ID NO: 480 - protein, 410 aa, Glycine max
MTSVGVAPTSGLREASGHGAAGVDRLPEEMNDMKIRDDREMEATVVDGNGTETGHIIVTTIGGRNGQPKQTISYMAERVVGHGSFGVVFQAKCSETGETVAIKKVLQDKRYKNRELQTMRLLDHPNVVALKHCFFSTTEKDELYLNLVLEYVPETVNRVIKHYNKLNQRMPLIYVKLYTYQIFRALSYIHRCIGVCHRDIKPQNLLVNPHTHQVKLCDFGSAKVLVKGEPNISYICSRYYRAPELIFGATEYTTAIDVWSVGCVLAELLLGQPLFPGESGVDQLVEIIKVLGTPTREEIKCMNPNYTEFKFPQIKAHPWHKIFHKRMPPEAVDLVSRLLQYSPNLRCTALDALTHPFFDELRDPNSRLPNGRFLPPLFNFKSHELKGVPAEILVKLVPEHARKQCPFLGL

SEQ ID NO: 481 - protein, 289 aa, Glycine max
MESKEEDVNVGANKFSERQPIGTAAQGGGDKDYKEAPPAPLFEPGELKSWSFYRAGIAEFVATFLFLYITILTVMGVNRSPSKCASVGIQGIAWAFGGMIFALVYCTAGISGGHINPAVTFGLFLARKLSLTRALFYIIMQCLGAICGAGVVKGFEGNANYELFKGGANFVNSGYTKGDGLGAEIVGTFVLVYTVFSATDAKRNARDSHVPILAPLPIGFAVFLVHLATIPITGTGINPARSLGAAIIYNRDHAWDDQWIFWVGPFIGAALAAVYHQIVIRAIPFKTRA

SEQ ID NO: 482 - protein, 370 aa, Glycine max
MALLLDNCESILLSLDTHKSVPAPFLTKTYQLVDDPSTDHIVSWGEDDTTFVVWRPPEFARDLLPNYFKHNNFSSFVRQLNTYGFRKIVPDRWEFANEFFKKGEKNLLCEIHRRKTHHQHHQQVQAMNNHHHHHKFGLNVSSIFPFHNNRLSVSPSHDSDEVIIPNWCDSPPRGVAGVNNNNSSSNNYNTVTALSEDNERLRRSNNMLMSELAHMKKLYNDIIYFVQNHVKPVAPSNNNNFPSFLLCSDNSNINNNTSPQTQTQAQASPMSNVSTVQRQLKQFVGCYSNNTKQARAVNSPTNSSITIVEEEASSNSCKTKLFGVSLQSKKRVHPEYGSNNVLQSSETNKARLALENDELLGLNLMPPSTC

SEQ ID NO: 483 - protein, 370 aa, Glycine max; identical to SEQ ID NO: 482

SEQ ID NO: 484 - protein, 879 aa, Glycine max
MDLVPSVKEKLNYFRIKELKDVLTQLHLSKQGKKQDLVDRILSVLSDEQVSKMWAKKNAGGKEQVAKLVDDTYRKMQISGATDLASKGQGASDSSSVKVKSEFDDAFQRDVKIRCLCGSRLETEDLVKCDDPRCHVWQHISCVIIPEKPTEGIPPVPDKFYCELCRLTRADPFWVSVAHPLHPVKLTTTSNPTDGNNPVQSVERTFQLTRADMDLVSKPEFDVEAWCMLLNDKVPFRMQWPQYTDLQVNGVPVRATNRPGSQLLGANGRDDGPIITPYTKDGINKISLTGCDARIFCLGVRIVKRRSMQQILNSIPKESDGEKFEEALARVCRCVGGGNAADDADSDSDLEVVSDTFTINLRCPMSGSRMKIAGRFKPCIHMGCFDLEVFVEMNQRSRKWQCPICLKNYALENIIIDPYFNRITSMMMNCGEEIAEIEVKPDGSWRVKVKSESERLELGNLAQWRLPDGTLCVSTDGDVKRVDTLKQVKQEGVSDSPAGLKLGIKKNCNGVWEVSKPEGTNTSSGNNLKRVFGNPEQVVIPMSSSATGSGRDGDDPSVNQGGGGHIDYSTTNGIEMDSLCLNNVDLAYEYTAPNTSAQVGGAEVIVLSDSEEDNDLLASPAIAYKNNRNDATDGYSVPPPVIVDSYTEDHNLGGNSCLGLFPNDDDFGMSSLWPLPSGSQAGPGFQLFGSDADVSDALVHLQHDPMNCSSSLNGYALAPDTALGSGGILQESSAGRSVADLNGGLVDNPLAFGGDDPSFQIFLPTRPADSSMHNELRDQANVANGVCTEEDWISLRLGGGAGGNNGDAPTQNGLNSRHQIPTREGAKNTLDDTASLLLGMNDVRSDRARRQRSDSPFSFPRQKRSVRPRLYLSIDSDSE

SEQ ID NO: 485 - protein, 540 aa, Glycine max
MWDLNDSPDQRINKDEESEEGCSSLNKTSFDGDDDNNNNKGKRVGSVSNSSSSAVVIGDGSEEEYEEEEEDEEGVGVGGGRSMKKRSSKIFGFSVTQNEEESMDSDHPPVTRQFFPVEDADVAVATGGGGTGVSSTFPRAHWVGVKFCQSETLGTGKSSVEVSQPMKKSRRGPRSRSSQYRGVTFYRRTGRWESHIWFYLCCRDCGKQVYLGGFDTAHAAARAYDRAAIKFRGVEADINFNIEDYEDDLKQMSNLTKEEFVHVLRRQSTGFPRGSSKYRGVTLHKCGRWEARMGQFLGKKYVYLGLFDTEIEAARAYDKAAIKCNGKEAVTNFDPSIYDNELNSAESTGNAPDHNLDLSLGNSTSNPGNDQALGNQAPNAVTHDQHMPSESNWRNGGIKPKLVNILPKPCYRSNNKDTHGRDVHGESETLRMLSQTHLHSPAFNEMQQRYGPYRSPGGESQMLQNFAHIHPPNFHFPRSSIGGRIGSDLSLSVADQQQWQTGPSRYLATAAASSSFQQEIRPSSQGWLQKNGLHSLMRPS

SEQ ID NO: 486 - protein, 418 aa, Glycine max
MDEIDVPPFFVCPISLELMKDPVTVSTGITYDRDSIEKWLFAEVKNDTCPVTKQPLLPDLTPNHTLRRLIQAWCTVNASHGVQRIPTPKPPVDKTLIEKLLRNTSASDSPSLQLRSLRTLKSIASESQSNKRCIESAEGAVNFLATIITTTTTTTTNLLDDDIELEIKTSTAHEALSLLHSIQLSESGLKALLNHPEFINSLTKMMQRGIYESRAYAVFLLNSLSEVADPAQLINLKTDLFTELVQVLKDQVSEKVSKATLQALIQVCSWGRNRVKAVEAGAVPVLVELLLECNERKPIEMVLVLLEILCQSADGRAGLLAHAAGVVIVAKKILRVSTMANDRAAKILLSVCRFSPTPGLVQEMVQLGVVAKLCLVLQVDSGNKAKEKAREILKLHARAWRNSPCIPHNLLASFPMSS

SEQ ID NO: 487 - protein, 443 aa, Glycine max
MAASVSTVGAVNRALLNLNGSGAGASAPSSAFFGTSLKKVIASRVPNSKVSGGSFKIVAVEEKKEIEETQQTDKDRWKGLAYDISDDQQDITRGKGLVDSLFQAPQDAGTHYAVMSSYEYLSTGLRQYLDNKMDGFYIAPAFMDKLVVHISKNFMTLPNIKVPLILGIWGGKGQGKSFQCELVFAKMGINPIMMSAGELESGNAGEPAKLIRQRYREAADMIKKGKMCALFINDLDAGAGRLGGTTQYTVNNQMVNATLMNIADNPTNVQLPGMYNKEENPRVPIIVTGNDFSTLYAPLIRDGRMEKFYWAPTREDRIGVCTGIFRTDGIPEQDIVKLVDTFPGQSIDFFGALRARVYDDEVRKWISGVGVDSVGKKLVNSKDGPPTFEQPKMTLEKLLLYGNMLVQEQENVKRVQLADKYLNEAALGNANEDAIQRGTFFQS

SEQ ID NO: 488 - protein, 880 aa, Glycine max
MDLVPSVKEKLNYFRIKELKDVLTQLHLSKQGKKQDLVDRILSVLSDEQVSKIWAKKNAGGGKEQVAKLVDDTYRKMQISGATDLASKGQGASDSSSVKVKSEFDDAFQPDVKIRCLCGSRLETENLVKCDDARCHVWQHISCVIIPEKPTEGIPLVPDKFYCELCRLTRADPFWVSVAHPLHPVKLTTTSNPTDGNNPVQSVERTFQLTRADKDLVSKPEFDVEAWCMLLNDKVPFRMQWPQYTDLQVNGVPVRATNRPGSQLLGANGRDDGPIITPYTKDGINKISLTGCDARIFCLGVRIVKRRSMQQILNSIPKESDGEKFEDALARVCRCVGGGNAVDDADSDSDLEVVSDTFTVNLRCPMSGSRMKIAGRFKPCIHMGCFDLEVFVEMNQRSRKWQCPICLKNYALENIIIDPYFNRITSMMMNCGEEIAEIEVKPDGSWRVKVKSESERLELGNLAQWRLPDGTLCVSTAGDVKRVDTLKQVKQEGVSDCPAGLKLGIRKNRNGVWEVSKPEGTNTSSGNKLKGAFGNPEQVVIPMSSSATGSGRDGDDPSVNQGGGGHIDHSTTNGIEMDSLCLNNVDLAYEYNEPNTSAQVGGAEVIVLSDSEEDNDLLVSPAIAYKNNRNDATDGYSVPPPVIVDSYTEEHNLGGNSCLGLFPNDDEFGMSSLWSLPSGSQAGPGFQLFGSDADVSDALVHLQHGPMNCSSSLNGYALAPNTALGSGSILQESSAGRSDADLNGGLVDNPLAFGGDDPSLQIFLPTRPADSSMHNELRDQASVANGVCTEEDWISLSLGGGTGGNNGDASTQNGLNSRHQIPTREGATNTLDDTASLLLGMNDVRSDRARRQRSDSPFSFPRQKRSVRPRLYLSIDSDSE

SEQ ID NO: 489 - protein, 382 aa, Glycine max
MGAYDQVSLKPLDSSRKRKSRSRGYGTGSVAETIAKWKEYNEHLYSGKDDSRTTRKAPAKGSKKGCMKGKGGPQNSQCNYRGVRQRTWGKWVGEIREPNRGSRLWLGTFSSAQEAALAYDEAARAMYGPCARLNFPGITDYASFKESLKESPMAASSSCSSAETATSDTTTTSNQSEVCAAEDVKENPRLVNVNDKVNDCHKAYEAASPTSRMKQEPKDEAVDHMVPGAGKILDVRPEGTHDAGQVAEDVNKDQMDLPWIDGFDFSDNYLNRFSTDELFQVDELLGLIDNNPIDESALMQNGNPQVDDTLSSFIYQLQNPDAKLLGSLPHMEQTPSGFDYGLDFLKTVESGDYNGGGEEPRFLNLDDDLNPDSKGMQARKDD

SEQ ID NO: 490 - protein, 278 aa, Glycine max
MANAAEVSALKRIKLHLLGELSPLATPQNKFDQTNPSPSESSNSESSSISLNHYFTDLLEPEIEFPLFEFDSKPQVIDLETPKTLISAEKKPQFNRKPSLLIAVPKKTEWIQFGNPEVAAPENQPEKKHYRGVRQRPWGKFAAEIRDPNKRGSRVWLGTFDTAIEAAKAYDRAAFRLRGSKAILNFPLEVNTAAETVSVAAVDVERKRRREEEEVVVEDVKAVVKKEKITEHDVSCFRGMPLTPSMWTGFWDSDVKDIFNIPPLSPLSPFGFSPLVAV

SEQ ID NO: 491 - protein, 410 aa, Glycine max
MSENMYPRLLFFDHTHSKMVWVKHQIQQKDGYLSYSPPLLSSSSSSSSSSSSSSPPYPLGATFHKESSLPSSTPPPPPSGTRISPAVLFIIVVLAVLFFISGLLHLLIRFLIKHPSSASAQSNRHQELSTSDALQRQLQQLFHLHDSGLDQAFIDALPVFQYKEIVGLKEPFDCAVCLCEFSEKDKLRLLPMCSHAFHISCIDTWLLSNSTCPLCRGTLLTQGFSIENPIFDFDDLREDEGCPCNGENGFNTRQKTVVVEESVEKEKGVFPVRLGKFKKLSVKGGGESEVGETSSSNLDARRCYSMGSYQYVVGNSDLRVTLNHDEIGKGQVTRLTKGMELDDGKVSVEEGDVEAKKISSVSKGDSFSVSKIWLWPKKGKLPTSLDGQFGRPMPSYLNTDFPRMREPEGA

SEQ ID NO: 492 - protein, 185 aa, Glycine max
MNGGESYGAIETQYIRRHHRHEPRENQCTSALVKHIRAPVHLVWSLVRRFDQPQKYKPFVSRCIMQGDLGIGSVREVNVKSGLPATTSTERLEQLDDEEHILGIRIVGGDHRLRNYSSIITVHPEVIDGRPGTMVIESFVVDVPDGNTRDETCYFVEALIRCNLSSLADVSGRMAVQGRTNPINH

SEQ ID NO: 493 - protein, 369 aa, Glycine max
METVLFNHSPPLEFKGLSKEEEDSLLGQVEIWRYMTCFTDSVALKAVIELRIADILDRYGKPLSLSQIVENIEDAPSPDASLLQRVLRVMVRRKIFSAQESETGETLFGLTRASKWILRDTKMTLAPMLLLENHPIHLNPAHYISEIIREGTKNGTAFFKCHGHEQFEMTGLDPEYNRLFNEGMVCTARVVSKAVITGYKDGFNQIKSLVDVGGGIGGSLSEIVRAYPHINAINFDLPHVVATAPKFDGITHVGGDMFVSIPSADAIYMKWILHDWSDEHCIKILKNCRKAIPEKTGKVIIVDHVLRPEGNELFTDVGIAFDMMLLAHNAGGKERTEENWKWLFKETGFARYNIIKINALPSIIEAFPI

SEQ ID NO: 494 - protein, 260 aa, Glycine max
MERSLSGSSEEEMSITKGPWTEEEDSVLFNYITVHGEGHWNSVARYTGLKRTGKSCRLRWLNYLRPNVRRGNITLEEQLLILDLHSRWGNRWSKIAEHLPGRTDNEIKNYWRTRVVKQAEQLKCEVNSKQFRDTLRFVWMPRMLERIQAQASSSSSSSSGQAHQTTLISNAQAHSDPCGVMTTNPSLLSEVSSSALDAHAPSLYDSSASYNLMGGGSSSSYSAEYCYYSDIAGNGFGGSDLWTDENICFLQQLLADHDLS

SEQ ID NO: 495 - protein, 355 aa, Glycine max
MCMERIRVKEEEAMTCGGGGSSSSSFISPQAQPMEGLHEVGPPPFLSKIFDMVEDPSTDSIVSWSMARNSFVVWDSHKFSAHILPRYFKHANFSSFIRQLNTYGFRKVDPDKWEFANEGFLAGQRHLLKTIKRRRNVSHSNQQKGGSGACVEVGKFGLEGELERLKRDRNILMAEIVRLRHQQLNSRDQLSAMEARMQATEKKQQQMMSFLAKALSNPSFMQQLVHKTPQSREVLLGVEINRKRRLPACPSVENLQQDNQDLATMETDMDTFFAPAYDNEFGNEIDEPASILVEDSILEDFLNKDLITGNPEDEVIIGDCTQVDVPMEDLVANPDDWSEQLQDLVDHMDYLGSKP

SEQ ID NO: 496 - skipped

SEQ ID NO: 497 - protein, 509 aa, Glycine max
MDSLLLLKEIATSILIFLITRLSIQTFLKSYRQKLPPGPKGWPVVGALPLMGSMPHVTLAKMAKKYGPIMYLKMGTNNMVVASTPAAARAFLKTLDQNFSNRPSNAGATHLAYDARDMVFAHYGSRWKLLRKLSNLHMLGGKALDDWAQIRDEEMGHMLGAMYDCNKRDEAVVVAEMLTYSMANMIGQVILSRRVFETKGSESNEFKDMVVELMTVAGYFNIGDFIPFLAKLDLQGIERGMKKLHKKFDALLTSMIEEHVASSHKRKGKPDFLDMVMAHHSENSDGEELSLTNIKALLLNLFTAGTDTSSSIIEWSLAEMLKKPSIMKKAHEEMDQVIGRDRRLKESDIPKLPYFQAICKETYRKHPSTPLNLPRISSEPCQVNGYYIPENTRLNVNIWAIGRDPDVWNNPLEFMPERFLSGKNAKIDPRGNDFELIPFGAGRRICAGTRMGIVLVHYILGTLVHSFDWKLPNGERELDMEESFGLALQKKVPLAALVTPRLNPSAYIS

SEQ ID NO: 498 - protein, 187 aa, Glycine max
MASCLPNASPFLVMLAMCLLISTSEAEKYVVGGSEKSWKFPLSKPDSLSHWANSHRFKIGDTLIFKYEKRTESVHEGNETDYEGCNTVGKYHIVFNGGNTKVMLTKPGFRHFISGNQSHCQMGLKLAVLVISSNKTKKNLLSPSPSPSPPPSSLLSPSPSPLPNNQGVTSSSGAGFIGVMMWLMLLL

SEQ ID NO: 499 - protein, 105 aa, Glycine max
MAKGNSPLERPSLASLDQKLAFAKRCSHEGVLAGAKAAVVASVASAIPTLASVRMLPWARANLNHTAQALIISTATAAAYFIVADKTVLATARKNSFNQPSNSEA

SEQ ID NO: 500 - protein, 987 aa, Glycine max
MRSCVCYTLLLFIFFIWLRVATCSSFTDMESLLKLKDSMKGDKAKDDALHDWKFFPSLSAHCFFSGVKCDRELRVVAINVSFVPLFGHLPPEIGQLDKLENLTVSQNNLTGVLPKELAALTSLKHLNISHNVFSGHFPGQIILPMTKLEVLDVYDNNFTGPLPVELVKLEKLKYLKLDGNYFSGSIPESYSEFKSLEFLSLSTNSLSGKIPKSLSKLKTLRYLKLGYNNAYEGGIPPEFGSMKSLRYLDLSSCNLSGEIPPSLANLTNLDTLFLQINNLTGTIPSELSAMVSLMSLDLSINDLTGEIPMSFSQLRNLTLMNFFQNNLRGSVPSFVGELPNLETLQLWDNNFSFVLPPNLGQNGKLKFFDVIKNHFTGLIPRDLCKSGRLQTIMITDNFFRGPIPNEIGNCKSLTKIRASNNYLNGVVPSGIFKLPSVTIIELANNRFNGELPPEISGESLGILTLSNNLFSGKIPPALKNLRALQTLSLDANEFVGEIPGEVFDLPMLTVVNISGNNLTGPIPTTLTRCVSLTAVDLSRNMLEGKIPKGIKNLTDLSIFNVSINQISGPVPEEIRFMLSLTTLDLSNNNFIGKVPTGGQFAVFSEKSFAGNPNLCTSHSCPNSSLYPDDALKKRRGPWSLKSTRVIVIVIALGTAALLVAVTVYMMRRRKMNLAKTWKLTAFQRLNFKAEDVVECLKEENIIGKGGAGIVYRGSMPNGTDVAIKRLVGAGSGRNDYGFKAEIETLGKIRHRNIMRLLGYVSNKETNLLLYEYMPNGSLGEWLHGAKGGHLKWEMRYKIAVEAAKGLCYLHHDCSPLIIHRDVKSNNILLDGDLEAHVADFGLAKFLYDPGASQSMSSIAGSYGYIAPEYAYTLKVDEKSDVYSFGVVLLELIIGRKPVGEFGDGVDIVGWVNKTRLELAQPSDAALVLAVVDPRLSGYPLTSVIYMFNIAMMCVKEMGPARPTMREVVHMLSEPPHSATHTHNLINL

SEQ ID NO: 501 - protein, 321 aa, Glycine max
MGLTGAYNDPLQEQDGISVIKYAFSKGITFFDTADVYGANANELLVGKALKQLPREKIQIATKFGIASRGFPDMKIKGSPEYVRSCCEASLKRLDVEYIDLYYQRRVDTSVPIEETVGELKKLVEEGKVKYIGLSEASPDTIRRAHAIHPITAVQIEWSLWTRDIEEEIVPLCRELGIGIVPYSPLGRGFFGGKGVVENVPTNSSLKAHPRFQAENLDKNKNIYERIEGLAKKHQATPAQLALAWVLQQGEDVVPIPGTTKIKNLDQNIGALAVKLSEKDLREISEAVPIGDVAGGRYYNGLDHFSWKYANTPPKDSKIST

SEQ ID NO: 502 - protein, 190 aa, Glycine max
MRYLSLSTFSLLCITFVVMAASVDPLVVGRVIGDVVDMFIPSVNMSVYFGSKHVTNGCDIKPSIAISPPKLALTGNMDNLYTLVMTDPDAPSPSEPSMREWIHWILVDIPGGTNPFRGKEIVSYVGPRPPIGIHRYIFVLFQQKGPLGLVEQPPTRASFNTRYFARQLDLGLPVATVYFNSQKEPTVKRR

SEQ ID NO: 503 - protein, 1187 aa, Glycine max
MKALYRSSLLLLLLLFISVCFASSSSPVTQQLLSFKNSLPNPSLLPNWLPNQSPCTFSGISCNDTELTSIDLSSVPLSTNLTVIASFLLSLDHLQSLSLKSTNLSGPAAMPPLSHSQCSSSLTSLDLSQNSLSASLNDMSFLASCSNLQSLNLSSNLLQFGPPPHWKLHHLRFADFSYNKISGPGVVSWLLNPVIELLSLKGNKVTGETDFSGSISLQYLDLSSNNFSVTLPTFGECSSLEYLDLSANKYLGDIARTLSPCKSLVYLNVSSNQFSGPVPSLPSGSLQFVYLAANHFHGQIPLSLADLCSTLLQLDLSSNNLTGALPGAFGACTSLQSLDISSNLFAGALPMSVLTQMTSLKELAVAFNGFLGALPESLSKLSALELLDLSSNNFSGSIPASLCGGGDAGINNNLKELYLQNNRFTGFIPPTLSNCSNLVALDLSFNFLTGTIPPSLGSLSNLKDFIIWLNQLHGEIPQELMYLKSLENLILDFNDLTGNIPSGLVNCTKLNWISLSNNRLSGEIPPWIGKLSNLAILKLSNNSFSGRIPPELGDCTSLIWLDLNTNMLTGPIPPELFKQSGKIAVNFISGKTYVYIKNDGSKECHGAGNLLEFAGISQQQLNRISTRNPCNFTRVYGGKLQPTFNHNGSMIFLDISHNMLSGSIPKEIGAMYYLYILNLGHNNVSGSIPQELGKMKNLNILDLSNNRLEGQIPQSLTGLSLLTEIDLSNNLLTGTIPESGQFDTFPAAKFQNNSGLCGVPLGPCGSEPANNGNAQHMKSHRRQASLAGSVAMGLLFSLFCVFGLIIIAIETRKRRKKKEAALEAYGDGNSHSGPANVSWKHTSTREALSINLATFEKPLRKLTFADLLDATNGFHNDSLIGSGGFGDVYKAQLKDGSVVAIKKLIHVSGQGDREFTAEMETIGKIKHRNLVPLLGYCKVGEERLLVYEYMKYGSLEDVLHDQKKAGIKLNWAIRRKIAIGAARGLAFLHHNCIPHIIHRDMKSSNVLLDENLEARVSDFGMARLMSAMDTHLSVSTLAGTPGYVPPEYYQSFRCSTKGDVYSYGVVLLELLTGKRPTDSADFGDNNLVGWVKQHAKLKISDIFDPELMKEDPNLEMELLQHLKIAVSCLDDRPWRRPTMIQVMAMFKEIQAGSGIDSQSTIANDEEGFNAVEMVEMSIKEAPELSKH

SEQ ID NO: 504 - protein, 296 aa, Glycine max
MMEPQQQQQQAQGSQQQQQNEDGGSGKGGFLSRQSSTRWTPTNDQIRILKELYYNNGIRSPSAEQIQRISARLRQYGKIEGKNVFYWFQNHKARERQKKRFTSDHNHNNVPMQRPPTNPSAAWKPDLADPIHTTKYCNISSTAGISSASSSVEMVTVGQMGNYGYGSVPMEKSFRDCSISAGGSSGHVGLINHNLGWVGVDPYNSSTYANFFDKIRPSDQETLEEEAENIGATKIETLPLFPMHGEDIHGYCNLKSNSYNYDGNGWYHTEEGFKNASRASLELSLNSYTRRSPDYA

SEQ ID NO: 505 - protein, 173 aa, Glycine max
MARMPLEPLIVGRVIGEVLDSFTTSTKMIVSYNKNQVYNGHELFPSTVNTKPKVEIEGGDMRSFFTLIMTDPDVPGPSDPYLREHLHWIVTDIPGTTDATFGKELVSYEIPKPNIGIHRFVFVLFKQKRRQCVTPPTSRDHFNTRKFAAENDLALPVAAVYFNAQRETAARRR

SEQ ID NO: 506 - protein, 175 aa, Glycine max
MPGGSRNPLVVGRVIVEVIDPFEISIPFRVTYGNRDLGNGCELKPSQVANQPRVSVGGDDLRNFYTMVLVDPDAPSPSNPNFREYLHWLVTDIPETTGPNFGNEVVSYESPRPTMGIHRLVFVLFRQQFRQRVYAPGWRQNFNTREFAELYNLGLPVAAVFFNCQRESGSGGRTF

SEQ ID NO: 507 - protein, 468 aa, Glycine max
MVLVLWSRGTKNMDFLTLFTLLLLLFIHTALSSTQYHDGNILLTHRKIFPKQEAITSYAVIFDAGSTGSRVHVFHFDQNLDLLRIGNELEFYDKVTPGLSAYADNPQQAAESLIPLLEEAESVVPEDLYPTTPVKLGATAGLRLLEGDASERILQAVRDLLKNRSTLNTQPDAVAIIDGTQEGSYLWVTINYLLGKLGKRFSKTVGVVDLGGGSVQMAYAISRNTAKNAPKPPDGEEPYIKKLVLKGKEYDLYVHSYLHYGREASRAEILKVTDGSANPCILAGFDGTYTYSGADYKAFAPISGSSYDECREVVLQALKLNESCPHQNCTFGGIWDGGRGSGQKILFGTSSFYYLPTEIGIIDLNKPNSKIHPVDLEIEAKRACETKLEDAKSTYPNLAEDRLPYVCLDIAYQYALYTDGFGLDPWQEITVANEIEYQDALVEAAWPLGTAIEAISSLPKFDRLMYFI

SEQ ID NO: 508 - protein, 361 aa, Glycine max
MRNPSLPTLATTKTKVKNNSNKSTNNNNNIGTNYSPCCNNVGLKRGPWTPEEDEVLANYINKEGEGRWRTLPKRAGLLRCGKSCRLRWMNYLRPSVKRGHIAPDEEDLILRLHRLLGNRWSLIAGRIPGRTDNEIKNYWNTHLSKKLINQGIDPRTHKPLNPPSIAVPSSSTTSTIPPSKPPPVIITNNNINPFHHDLTNMFNQGVHLNHLGQHHQPPPLSNPCDNHNPVPAAATDDVSAMGFMDNNNEDCNNDGININYYSDDVFSSFLNSLINDDAFEAQQQQHHVQTEIPTPSERSINPLPCDDRVDDHHLGSITTASASQGYDDELGVLWESPLVSATFSQHVNDHITKRVHDHHNQ

SEQ ID NO: 509 - protein, 532 aa, Glycine max
MCTLLCLRSTILHHVALIKSFSTTRTKGSPLLSFLLQQLKAKTLLFSLISLAKTILVQLISFSLCTFSCFHKAMKSRPLHIAMYPWLAMGHQTAFLHLCNKLAIRGHKISFITPPKAQAKLEPFNLHPNSITFVTINVPHVEGLPPDAQTTADVTYPLQPQIMTAMDLTKDDIETLLTGLKPDLVFYDFTHWMPALAKRLGIKAVHYCTASSVMVGYTLTPSRFHQGTDLMESDLMEPPEGYPDSSIKLQTHEARTFAAKRKDTFGSNVLFYDRQFIALNEADLLAYRTCREIEGPYMDYIGKQFNKPVVATGPVILDPPTLDLEEKFSTWLGGFEPGSVVYCCFGSECTLRPNQFLELVLGLELTGMPFLAAVKAPLGFETVESAMPEGFQERVKGRGFVYGGWVQQQLILAHPSVGCFITHCGSGSLSEALVNKCQLVLLPNVGDQILNARMMGTNLEVGVEVEKGDEDGMYTKESVCKAVSIVMDCENETSKRVRANHARIRELLLNKDLESSYVDSFCMRLQEIVEGI

SEQ ID NO: 510 - protein, 1123 aa, Glycine max
MSTSRPSQSSSNSGRSRRSARAMALATVDAKLHATFEESGSSFDYSSSVRISGTADGVNQPRHDKVTTAYLHHMQKGKMIQPFGCLLALDEKTCKVIAYSENAPEMLTMVSHAVPSVGDHPALGIGTDIKTLFTAPSASALQKALGFAEVLLLNPVLIHCKTSGKPFYAIIHRVTGSMIIDFEPVKPYEVPMTAAGALQSYKLAAKAITRLQSLPSGSMERLCDTMVQEVFELTGYDRVMAYKFHEDDHGEVIAEITKPGLEPYLGLHYPATDIPQASRFLFMKNKVRMIVDCHAKHVRVLQDEKLPFDLTLCGSTLRAPHSCHAQYMANMDSIASLVMAVVVNDNEEDGDTDAIQPQKRKRLWGLVVCHNTTPRFVPFPLRYACEFLAQVFAIHVNKEIELEYQIIEKNILRTQTLLCDLVMRDAPLGIVSESPNIMDLVKCDGAALIYKNKVWRLGVTPSESQIREIAFWLSEYHMDSTGFSTDSLSDAGFPSALSLGDVVCGMAAVRVTAKDVVFWFRSHTAAEIRWGGAKHEAGEKDDGRRMHPRSSFKVFLDVVKARSLPWKEYEIDAMHSLQLILRNAFKDTESMDLNTKAINTRLSDLKIEGMQELEAVTSEIVRLIETATVPILAVDVDGLVNGWNIKIAELTGLPVGEAMGKHLLTLVEDSSTDRVKKMLNLALLGEEEKNVQFEIKTHGSKMDSGPISLVVNACASRDLRDNVVGVCFVAHDITAQKNVMDKFTRIEGDYKAIVQNRNPLIPPIFGTDEFGWCCEWNPAMTKLTGWKREEVMDKMLLGELFGTHMAACRLKNQEAFVNLGVVLNKAMTGLETEKVPFGFFARNGKYVECLLSVSKKLDVEGLVTGVFCFLQLASPELQQALHIQRLSEQTALKRLNALSYMKRQIRNPLCGIIFSRKMLEGTALGTEQKQLLRTSAQCQQQLSKILDDSDLDSIIDGYLDLEMAEFTLHEVLVTSLSQVMTKSNGKSIRIVNDVAEQIVMETLYGDSLRLQQVLADFLLISINFTPNGGQVVVAGTLTKEQLGKSVHLVKLELSITHGGSGVPEALLNQMFGNNGLESEEGISLLISRKLLKLMNGDVRYLREAGKSAFILSAELAAAHNLKG

SEQ ID NO: 511 - protein, 170 aa, Glycine max
MPLEPLIVGRVIGEVLDSFTTSTKMTVSYNKKQVYNGHELFPSTVNTKPKVEIEGGDMRSFFTLIMTDPDVPGPSDPYLREHLHWIVTDIPGTTDATFGKELVSYEVPKPNIGIHRFVFVLFKQKRRQCVTPPTSRDHFNTRKFAAENDLGLPVAAVYFNAQRETAARRR

SEQ ID NO: 512 - protein, 172 aa, Glycine max
MARENPLVIGGVIGDVLNPFTSSVSLTVSINNRAISNGLELRPSQVVNRPRVTVGGEDLRTFYTLVMVDADAPSPSNPVLREYLHWMVTDIPATTNASFGREVVFYESPNPSVGIHRIVFVLFQQLGRDTVITPEWRHNFNSRNFAEINNLAPVAAAYANCQRERGCGGRRY

SEQ ID NO: 513 - protein, 175 aa, Glycine max
MPSGSRNPLVVGRVIGEVIDPFESSIPFRVTYGNKEVGNGCELKPSQVPNQPRVSIGGDDLRKFYTMVMVDPDAPSPSNPNFREYLHWLVTDIPETTGPNFGNEIVSYESPRPTMGIHRFVFVLFRQQFRQRVYAPGWRQNFNTREFAELYNLGLPVAAVFFNCQRETGSGGRTF

SEQ ID NO: 514 - protein, 346 aa, Glycine max
MNGGATTATFRSILDKPLNQLTEDDISQLTREDCRRFLKEKGMRRPSWNKSQAIQQVISLKALLEPSDDDTPPPPPPAMHHRSHAQPQPQVNLSEPPPPPPKAPPPEEPAFHAAEDIQKSASSGEKPTETNDTNTNVASPKGCATSGSFGQMTIFYCGKVNVYDRVSPDKARAIMQLATSPVQLTQDDPLNGNAAVWTSPCHLPMDKDVLVPVDTTILQVAQADKMVEYPLQYREKGSIARDADVEGQEHRKVSLQRYLEKRKDRGRLKGKKLTGITSSNFEMYLNLPVKVHSSNGNSSRSSTSSPPQPRLPLVSSGSDQLKVALPIDLNDKVSLQMFKNAKIQTR

SEQ ID NO: 515 - protein, 176 aa, Glycine max
MPSGSRDPLVVGGVIGDVLDPFEYSIPMRVTYNNRDVSNGCEFKPSQVVNQPRVNIGGDDLRNFYTLIAVDPDAPSPSDPNLREYLHWLVTDIPATTGASFGHEVVTYESPRPMMGIHRLVFVLFRQLGRETVYAPGWRQNFNTKEFAELYNLGLPVAAVYFNIQRESGSGGRRLY

SEQ ID NO: 516 - protein, 462 aa, Glycine max
MSCEVVNNDELHVVMFPFLAFGHINAFVQLSNKLFSHGVRITFLSAASNIPRIKSTLNLNPAINVIPLYFPNGITSTAELPPNLAANLIHALDLTQPHVKSLLLELKPHYVFFDFAQNWLPKLASELGIKSVRFASFSAISDSYITVPSRLADIEGRNITFEDLKKPPPGYPQNSNISLKAFEAMDLMFLFKRFGEKNFTGYERVLQGFSDCSLIVFRSCKEIEESYLDYIEKQFGKLVLLTGFLVPEPSMDVLEEKWSKWLDSFPAKSVILCSFGSEQFLNDDQIKEVASGLELSGLPFILVLNFPSNLSAKAELERALPKGFLERVKNRGVVHTGWFQQQLVLKHSSVGCHLGHGGFNSVIEALASDCELVLLPFKADQFFNAKLIAKALEAGIEVNRSEDGDFKKEDILKAVKTIMVEDDKEPGKQIKENHMKWKEFLLNKGIQNKFITDLVAQLKSMA

SEQ ID NO: 517 - protein, 311 aa, Glycine max
MSSSPWWSNPSDIRSLLLDSALLPNSVAVDTMFIDIKECLPHIIFPLSVSLSVGTMRPERNPLDLNNLPDEYSRDGKQVLEDHTSSSGCRKKKSGGKDGKDECGKVYECRFCSLKFCKSQALGGHMNRHRQERETETLNQARQLVFRCDHNIAAQGAPHLGCCQTIGTGGYHPSGDPTVPLRFPRYFSGSSSTHMPPSPPPPPPPQRPYLYPSPTRPVSFGSSHFPLQHAVNDYYVGHVMSGGSHGHYVGGESTRSYTCIGAPVGQGGGFAGGKEGSAVQEEGLSTWGRGYSGAQDRLDPPSAINRFQDGF

SEQ ID NO: 518 - protein, 105 aa, Glycine max
MASKFIFTTVVLLMLLCLLLMREPSGCGSAYECFGANAADLRDIPNRKVLSVLKDKKTSALKASLQGSSSNKYGEKPLNWELRKVPSGPDPLHHNGVNPKKPQTP

SEQ ID NO: 519 - protein, 264 aa, Glycine max
MTLSFLYRRPERNPLDLNNLPDEYSRDGKQVLEDHTSSPGCRKKKSGGKDGKDECGKVYECRFCSLKFCKSQALGGHMNRHRQERETETLNQARQLVFRSDHIIAPQGAPHLGCCQPIGTGGYHPSGDPTVPLRFPRYFSGSSSTHMPPPPPPPPPPQQSHLYASPSRPVSFGSSHFPHQHAVNDYYVGHVMSGGSHGHYVGGESTSSYTYIGAPVGQAGGFAGGGKEGSAVQEEGLSWGRSYSGGAQHRLDPPSAINRFHDGF

SEQ ID NO: 520 - protein, 105 aa, Glycine max
MASKFIFTTVVLVMLLCLLLMRDPSGCGSAYECFGANAAGLTDIPNRKVLPVLKDKKTSALKASLRGSSSNKYGEKPLNWELRKVPSGPDPLHHNGVNPKNPQTP

SEQ ID NO: 521 - protein, 805 aa, Glycine max
MATDRLTRVHSLRERLDETLTANRNEILALLSRIEAKGKGILQHHQVIAEFEEIPEENRQKLTDGAFGEVLRSTQEAIVLPPWVALAVRPRPGVWEYLRVNVHALVVEELQPAEYLHFKEELVDGSSNGNFVLELDFEPFNAAFPRPTLNKSIGNGVQFLNRHLSAKLFHDKESLHPLLEFLRLHSVKGKTLMLNDRIQNPDALQHVLRKAEEYLGTVPPETPYSEFEHKFQEIGLERGWGDNAERVLESIQLLLDLLEAPDPCTLETFLGRIPMVFNVVILSPHGYFAQDNVLGYPDTGGQVVYILDQVRALENEMLHRIKQQGLDIVPRILIITRLLPDAVGTTCGQRLEKVFGTEHSHILRVPFRTEKGIVRKWISRFEVWPYLETYTEDVAHELAKELQGKPDLIVGNYSDGNIVASLLAHKLGVTQCTIAHALEKTKYPESDIYWKKLEERYHFSCQFTADLFAMNHTDFIITSTFQEIAGSKDTVGQYESHTAFTLPGLYRVVHGIDVFDPKFNIVSPGADQTIYFPHTETSRRLTSFHPEIEELLYSSVENEEHICVLKDRSKPIIFTMARLDRVKNITGLVEWYGKNAKLRELVNLVVVAGDRRKESKDLEEKAEMKKMYGLIETYKLNGQFRWISSQMNRVRNGELYRVICDTRGAFVQPAVYEAFGLTVVEAMTCGLPTFATCNGGPAEIIVHGKSGFHIDPYHGDRAADLLVDFFEKCKLDPTHWDKISKAGLQRIEEKYTWQIYSQRLLTLTGVYGFWKHVSNLDRRESRRYLEMFYALKYRKLAESVPLAAE

SEQ ID NO: 522 - protein, 174 aa, Glycine max; identical to SEQ ID NO: 457

SEQ ID NO: 523 - protein, 245 aa, Glycine max
MRALTSSSSTFIPKRYSFFFFLSILFALRSSSGGCSEYHHHHAPMATIGGLRDSQGSQNSVQTEALARFAVDEHNKKQNSLLEFSRVVRTQEQVVAGTLHHLTLEAIEAGEKKLYEAKVWVKPWLNFKELQEFKPAGDVPSFTSADLGVKKDGHQPGWQSVPTHDPQVQDAANHAIKTIQQRSNSLVPYELHEVADAKAEVIDDFAKFNLLLKVKRGQKEEKFKVEVHKNNQGGFHLNQMEQDHS

SEQ ID NO: 524 - protein, 511 aa, Glycine max
MANIDIEGILKQQQPYDGRVPKTKIVCTLGPASRSVEMTEKLLRAGMNVARFNFSHGTHDYHQETLNNLKTAMHNTGILCAVMLDTKGPEIRTGFLKDGKPIQLKEGQEVTITTDYDIKGDPEMISMSYKKLPVHLKPGNTILCSDGTITLTVLSCDPDAGTVRCRCENTATLGERKNVNLPGVVVDLPTLTEKDKEDILGWGVPNKIDMIALSFVRKGSDLVNVRKVLGPHAKNIQLMSKVENQEGVLNFDEILRETDAFMVARGDLGMEIPVEKIFLAQKMMIYKCNLVGKPVVTATQMLESMIKSPRPTRAEATDVANAVLDGTDCVMLSGESAAGAYPELAVKIMARICIEAESSLDYGAIFKEMIRSTPLPMSPLESLASSAVRTANKAKAKLIVVLTRGGSTAKLVAKYRPAVPILSVVVPVLSTDSFDWTCSDETPARHSLIYRGLIPILGEGSAKATDAESTEVILEAALKSATERALCKPGDAVVALHRIGAASVIKICIVK

SEQ ID NO: 525 - protein, 411 aa, Glycine max
MALRLNPIPTQTFSLPQMASLRSPRFRMASTLRSGSKEVENIKKPFTPPREVHVQVTHSMPPQKIEIFQSLEDWAEENILAHLKPVEKCWQPQDFLPDPSSDGFEEQVKELRERAKELPDDYFVVLVGDMITEEALPTYQTMLNTLDGVRDETGASLTSWAIWTRAWTAEENRHGDLLNKYLYLSGRVDMKQIEKTIQYLIGSGMDPRTENSPYLGFIYTSFQERATFISHGNTARLAKEHGDIKLAQICGMIASDEKRHETAYTKIVEKLFESDPDGTVMAFADMMRKKIAMPAHLMYDGRDDNLFDNYSSVAQRIGVYTAKDYADILEFLVGRWKVEQLTGLSGEGRKAQEYICGLPPRIRRLEERAQARVKESSTLKFSWIHDRESTTLNAPREEHGEIFRQYRSEKC

SEQ ID NO: 526 - protein, 667 aa, Glycine max
MAGSWARRSLIVLAIISFGCLFAISIAKEEATKLGTVIGIDLGTTYSCVGVYKNGHVEIIANDQGNRITPSWVAFTDSERLIGEAAKNQAAVNPERTIFDVKRLIGRKFEDKEVQKDMKLVPYKIVNKDGKPYIQVKIKDGETKVFSPEEISAMVLIKMKETAEAFLGKKINDAVVTVPAYFNDAQRQATKDAGVIAGLNVARIINEPTAAAIAYGLDKKGGEKNILVFDLGGGTFDVSILTIDNGVFEVLATNGDTHLGGEDFDQRIMEYFIKLIKKKHGKDISKDNRALGKLRREAERAKRALSSQHQVRVEIESLFDGVDFSEPLTRARFEELNNDLFRKTMGPVKKAMEDAGLQKSQIDEIVLVGGSTRIPKVQQLLKDYFDGKEPNKGVNPDEAVAYGAAVQGSILSGEGGEETKDILLLDVAPLTLGIETVGGVMTKLIPRNTVIPTKKSQVFTTYQDQQTTVSIQVFEGERSLTKDCRLLGKFDLSGIPPAPRGTPQIEVTFEVDANGILNVKAEDKGTGKSEKITITNEKGRLSQEEIDRMVREAEEFAEEDKKVKERIDARNSLETYVYNMKNQVSDKDKLADKLESDEKEKIETAVKEALEWLDDNQSVEKEDYEEKLKEVEAVCNPIISAVYQRSGGAPGGAGGEGEDEDDSHDEL

SEQ ID NO: 527 - protein, 97 aa, Glycine max
MAALGGNRDVTGSQNSVEIDALARFAVEEHNKKQNALLEFEKVVTAKQQVVSGTLYTITLEAKDGGQKKVYEAKVWEKSWLNFKEVQEFKLVGDAPA

SEQ ID NO: 528 - protein, 814 aa, Glycine max
MTGNEFRFFLSCDISVPVTFRVERLEGNLPLPNPKSPDLETNAPTENRTKELFVECALYIDGAPFGLPTRTRLESSGPSYCWNELITLTTKYRDLTAQSQLTFTVWDLSHGEGLIGGATILLFNNKKQLKTGKQKLRLWAGKEADGTFPTSTPGKVPRHERGELERLEKLVNKYERGQIQRVDWLDRLTFKTMERIKERESLKNGSSHLYLVVDFCSFEHRVVFQESGANFLFPSPIASTNDIVVVWDPEVGKINPSEHKQLKLARSLTRGVIDRDLKPSSNERKSIQRILKYPPTRTLSGDERQLLWKFRFSLMSEKRALTKFLRCVEWSDVQEAKQALELMGKWEMIDVCDALELLSPVFESEEVRAYAVSVLERADDEELQCYLLQLVQALRFERSDKSRLSHFLVQRALRNIELASFLRWYVAVELYDPAYAKRFYCTYEILEENMMKIAAGVNGEEDGFKQWQSLVRQTELTAQLCSITREVRNVRGNTQKKIEKLRQLLSGLLSELTYFDEPIRSPLAPGVLIAGIVPSESSIFKSALHPLRLSFRTANGGTCKIIFKKGDDLRQDQLVVQMVSLMDRLLKLENLDLHLTPYKVLATGQDEGMLEFIPSRSLAQILSENRSIISYLQKFHPDDHGPFGITATCLETFIKSCAGYSVITYILGIGDRHLDNLLLRNDGGLFHVDFGFILGRDPKPFPPPMKLCKEMVEAMGGAESQYYTRFKSYCCEAYNILRKSSNLILNLFYLMAGSNIPDIASDPEKGILKLQEKFRLDLDDEASIHFFQDLINESVSALFPQMVETIHRWAQYWR

SEQ ID NO: 529 - protein, 341 aa, Glycine max
MCEHLLVSLSCYIWVRTQRIVEFNEMEQIKHRTVEVNGIKMHVAEKGEGPVVLFLHGFPELWYSWRHQILSLSSLGYRAVAPDLRGYGDTEAPPSISSYNCFHIVGDLVALIDSLGVQQVFLVAHDWGAIIGWYLCMFRPDKVKAYVCLSVPLLRRDPNIRTVDGMRALYGDDYYVCRFQKPGEMEAQMAEVGTEYVLKNILTTRNPGPPILPKGRFQFNPEMPNTLPSWLTEEDLAYYVSKFEKTGFTGPLNYYRNFNLNWELTAPWTGGQIKVPVKYITGELDMVYNSLNLKEYIHGGGFKQDVPNLEQVIVQKGVAHFNNQEAAEEIDNYIYDFINKF

SEQ ID NO: 530 - protein, 476 aa, Glycine max
MDLQQRPLKLHFIPYLSPGHVIPLCGIATLFASRGQHVTVITTPYYAQILRKSSPSLQLHVVDFPAKDVGLPDGVEIKSAVTDLADTAKFYQAAMLLRRPISHFMDQHPPDCIVADTMYSWADDVANNLRIPRLAFNGYPLFSGAAMKCVISHPELHSDTGPFVIPDFPHRVTMPSRPPKMATAFMDHLLKIELKSHGLIVNSFAELDGXECIQHYEKSTGHKAWHLGPACLVGKRDQERGEKSVVSQNECLTWLDPKPTNSVVYVSFGSVCHFPDKQLYGIACALEQSGKSFIWIVPEKKGKEYENESEEEKEKWLPKGFEERNREKGMIVKGWAPQLLILAHPAVGGFLSHCGWNSSLEAVTAGVPMITWPVMADQFYNEKLITEVRGIGVEVGATEWRLVGYGEREKLVTRDTIETAIKRLMGGGDEAQNIRRRSEELAEKAKQSLQEGGSSHNRLTTLIADLMRLRDSKSAT

SEQ ID NO: 531-534 - skipped (4 entries)

SEQ ID NO: 535 - protein, 182 aa, Glycine max
MCKKLVQMMQGNIWISPNSLGLVQGMTLLLKFQIGPSLGKSIFAPKDYSSSQFRGLKVLLAEDDGVNRTVTKKLLEKLGCQVIAVSSGFECLSAISGAGNSFRIILLDLHMPEMDGFELAKRIRKFHSRSWPLIIALITSAEEHVREKCLLAGMNGLIQKPIVLHQIADELRTVLQRAGEKL

SEQ ID NO: 536 - protein, 409 aa, Glycine max
MDWGLAISSHPKPYSVTTGGNLWRSKHTTKNIYFASSWISKASRHKRETQIEHNVLRFQQPSLDHHYKCIRGGSTYQECNRKFVVKAISKQPLGFEAHASNPKNILDSVKNVLSAFYWFSYPYTMIGITLCAFSSSLLAVEKLSDISLSFLIGVLQGVLPQLFIEIYLCGVNQLYDLEIDKINKPHLPMASGQFSFKTGVIISAAFLALSFGFTWITGSWPLICNLVVIASSWTAYSIDVPLLRWKRYPFVAAMCMISTWALALPISYFHHMQTVVLKRPIGFPRSLGFLVAFMTFYSLGLALSKDIPDVEGDKEHGIDSFAVRLGQKRAFWICVSFFEMAFGVGILAGASCSHFWTKIFTGMGNAVLASILWYQAKSVDLSDKASTGSFYMFIWKLLYAGFFLMALIR

SEQ ID NO: 537 - protein, 586 aa, Glycine max
MHIGTPTRTSPTSESPILKMDDAHKATTSNFTRAFGGRSFTGITMGSMEMEFFSDYGDVSRYKIQEVIGKGSYGVVCSAIDTHTGEKVAIKKIHDIFEHVSDAARILREIKLLRLLRHPDIVEIKHVMLPPSRRDFKDIYVVFELMESDLHQVIKANDDLTKEHYQFFLYQLLRALKYIHTANVYHRDLKPKNILANANCKLKICDFGLARVAFNDTPTTVFWTDYVATRWYRAPELCGSFYSRFYFVSADELTVRNDKARRYLTSMRKKQPIPFAQKFPNADPLALRLLERLLAFDPKDRPTAEEALADPYFKGLSKIEREPSCQPITKMEFEFERRRVTKEEIGELIFREILDAVDQFKQQFSHLEENGGKSYPIMPLERKHASLPRSTMVHSNMVPSKEQSNIASCINRQTTGEFNNNSRDTESPAPRSIPGLQKFSQAKPGKVVGPVIPYEYASVVKGTYDPRTFMRGSVLPSQPILPTNHYQRSTSGKQERSATEADKGVSLQSKLAQQCGVNAKIAPDTAINIDTNPFFMTRAGVNKIEQDDRIAIETKLLQSKAHQYGGISTTAHRKVGPVQYGMTRLF

SEQ ID NO: 538 - protein, 198 aa, Glycine max
MLAKAHNKGDGSKSLAKILAKWKEYNAQIDSSSDADKPIRKVPAKGSKKGCMKGKGGPENSRCNYRGVRQRTWGKWVAEIREPNRGNRLWLGTFPTAIGAALAYDEAARAMYGSCARLNFPNVSVSSFSEESSKDSPSANHCGSSMAVSANESMISPSNSGVDAEEDVDMEPISLSLSVKHENGEGESGISSSPPSSS

SEQ ID NO: 539 - protein, 178 aa, Glycine max
MASSMISSPAVTTVNRAGAGMVAPFTGLKSMAGFPTRKTNNDITSIASNGGRVQCMQVWPPIGKKKFETLSYLPDLDDAQLAKEVEYLLRKGWIPCLEFELEHGFVYREHNRSPGYYDGRYWTMWKLPMFGCTDASQVLKELQEAKTAYPNGFIRIIGFDNVRQVQCISFIAYKPPGF

SEQ ID NO: 540 - protein, 524 aa, Glycine max
MGMRTKLSLAIFFFFLLALFSNLAFGKCKETEVEEEDPELVTCKHQCQQQQQYTEGDKRVCLQSCDRYHRMKQEREKQIQEETREKKEEESREREEEQQEQHEEQDENPYIFEEDKDFETRVETEGGRIRVLKKFTEKSKLLQGIENFRLAILEARAHTFVSPRHFDSEVVFFNIKGRAVLGLVSESETEKITLEPGDMIHIPAGTPLYIVNRDENDKLFLAMLHIPVSVSTPGKFEEFFAPGGRDPESVLSAFSWNVLQAALQTPKGKLENVFDQQNEGSIFRISREQVRALAPTKKSSWWPFGGESKPQFNIFSKRPTISNGYGRLTEVGPDDDEKSWLQRLNLMLTFTNITQRSMSTIHYNSHATKIALVIDGRGHLQISCPHMSSRSSHSKHDKSSPSYHRISSDLKPGMVFVVPPGHPFVTIASNKENLLMICFEVNARDNKKFTFAGKDNIVSSLDNVAKELAFNYPSEMVNGVFLLQRFLERKLIGRLYHLPHKDRKESFFFPFELPREERGRRADA

SEQ ID NO: 541 - protein, 540 aa, Glycine max; identical to SEQ ID NO: 485

SEQ ID NO: 542 - protein, 307 aa, Glycine max
MAAKSKILVIGGTGYIGKFIVKASAETGHPTFVLVRDNTLSHPEKSKLVESFKSFGVTLLYGDLTDHDSLVKAIKQVDVVISALGGQQIDDQVKIIAAIKEAGNIKRFLPSEFGLDVDHHNAVEPVSSFFEKKVKIRRAIEAERIPYTYITSNLFAGHFLPNLLQQNVTTPPRDKVVILGDGNVKGVYVIEEDVATYTIKAVEDPRTLNKTVYVRPPANILTFNELVSLWEYKINSTLDKIYIPDDQLLKSIQESPFPDNFMLALRHSFLVKGDCNYEIDPSFGVEASKLYSEVKYTTVDNYLNAFV

SEQ ID NO: 543 - protein, 740 aa, Glycine max
MESCNCIDPQVPADDLLMKYQYISDFFIALAYFSIPLELIYFVKKSAVFPYRWVLVQFGAFIVLCGATHLINLWTFRIHSRTVAVVMTTAKVLTAVVSCATALMLVHIIPDLLSVKTRELFLKNKAAELDREMGLIRTQEETGRHVRMLTHEIRSTLDRHTILKTTLVELGRTLALEECALWMPTRTGLELQLSYTLRQQNPVGYTVPIHLPVINQVFSSNRAVKISPNCPVARLRPYAGKYMPGAVVAVRVPLLHLSNFQIYDWPEVSTRSYALMVLMLPSDSARQWHVHELELVEVVADQVAVALSHAAILEESMRARDQLMEQNVALDLARREAETAIRARNDFLAVMNHEMRTPMHAVIALSSLLQETDLTAEQRLMVETILKSSNLLATLINDVLDLSRLEDGSLQLEATTFNLHSLFREVLNLIKPVASVKKLSLTSHIASDLPMYAIGDEKRLMQTILNVVGNAVKFSKEGCISISAFVAKPESFRDARIPDFLPVLSDNHFYLRVQVKDSGSGINPQDIPKIFTKFAQNQSLTTRNPAGSGLGLAICRRFVNLMEGHIWVESEGIGKGCTVTFIVKLGIPDRSNEFKLPFVPKVPGNHGSTNFAGLKVLVTDDNGVSRTVTKGLLMHLGCDVTTASSSEECLRVVSLEHEVVFMDVCAGLDGYELAIRIHEKFTKHQDRPLIVALTGNTKKVTKENCMRVGMDGLILKPVSVDKMRGVLSELLERRVLFETV

SEQ ID NO: 544 - protein, 600 aa, Glycine max
MAPLNKVLLLLTLLFLAVDAKYKNKKDKKNSVFHKIPKFPKFPVPIIGGDQKVVVDGGNNAIAKPDFETNNLGHWELINKQSGVSAMQINLMPNNKMLVYDATVYRTSRLPYPKGMPCVQWVDDNLKQSKEDCFAHSMEYDIETNQVRALTVKTDPWCSCGGLTPDGTLVVAGGFADGGKTSRYYGGQPDCQDCDWREYPNKLQEPRWYATQAILANGEYIVIGGRRSFSYEFFPKEGQPSDKPIFFPFLYETSDIDENNLYPFVHLSSDGNLFIFANNRSLLLNPTTNKVVRTYPVLPGGSRNYPASGMSSILPIKLDGTELSSASIKVEVLVCGGNSHDSFILAETEKIFKPAIKDCSRMVITDPDPKWDSEEMPSGRTMGDSLVLPNGQILFINGAQKGTAAWWDADEPNFTPVLYFSEKPKGQRFKVLKPSQIARMYHSTSAVLPSGKIWVGGSNTHDTYKDKDRFPTETRIEAFSPPYLDPKLDKYRPQIVEESSEKKLMYGKNFETQFKLQDTNQKLTKQDIKVSMYFPPFTTHGYSMNQRLLFLKTFIAQNSEGTYKVTSKAPTFREVAPPGYYLLFIVHRGVPSKGMWVQIG

SEQ ID NO: 545 - protein, 540 aa, Glycine max
MQRSGYGSDGIYRSLRPSIVFPKNSNLSLVSHLFNRVAAFPSKPALIDADSSETLSFAELKLLTVRVAHGLLRLGVTKNDVVLFLAPNDIRYIVCFLAVASLGAAVTTVNPAYTAAEVSKQANDSKPKLLVTVAELWDKLEHLKLPAVFLRCSNAPHAPSSATSFDALVQLAGSVTEFPEIKIKQSDTAALLYSSGTTGLSKGVVLTHGNFVAASLMIGFDDDLAGVLHSVFLCVLPMFHVFGLMVISYGQLQRGSAVVSLKKFEFELVLKTIEKFKVTHLWVVPPIILALAKHGLVDKYDLSSLKHIGSGAAPLGKELMKECAKRFPHAIVSQGYGMTETCGIVSVENARMGIRNSGSTGMLVAGMEAQVVSVDTLKPLPPGQLGEIWVRGPNMMQGYHNNPQATRLTMDKKGWVHTGDLGYFDEDGQLFVVDRIKELIKYKGFQVAPAELEGLLVSHAEILDAVVIPYPDAEAGEVPVAYVVRSPNSSLTEEDVQKFIAKQVAPFKRIRRVTFINAVPKTASGKILRRELIEKVRSKI

SEQ ID NO: 546 - protein, 584 aa, Glycine max
MKRDHRDSCGGGGGGSVKGECSSMPSNGKANMWEEQQQQQQGMDELLAALGYKVRASDMADVAQKLEQLEMVMGCAQEEGISHLASDTVHYDPTDLYSWVQTMLTELNPEPNNNNNSLLGPSSLLIDNNTAPVFNDDSEYDLRAIPGIAAYPPPPPQDNNNNNNNLDEIETANNINKRLKPSPVESADSASEPTRTVLLVDHQEAGVRLVHTLLACAEAVQQENLKLADALVKHVGILAASQAGAMRKVASYFAQALARRIYGIFPEETLDSSFSDVLHMHFYESCPYLKFAHFTANQAILEAFATAGRVHVIDFGLRQGMQWPALMQALALRPGGPPTFRLTGIGPPQPDNTDALQQVGWKLAQLAQNIGVQFEFRGFVCNSLADLDPKMLEIRPGEAVAVNSVFELHRMLARPGSVDKVLDTVKKIKPKIVTIVEQEANHNGPGFLDRFTEALHYYSSLFDSLEGSSSSTGLGSPNQDLLMSELYLGRQICNVVANEGADRVERHETLSQWRGRLDSAGFDPVHLGSNAFKQASMLLALFAGGDGYRVEENNGCLMLGWHTRPLIATSAWKLPSPNDLHCKL

SEQ ID NO: 547 - protein, 2260 aa, Glycine max
MADIGRRNGYANSVLPNRPPAAISEVDEFCNALGGNRPIHSILIANNGMAAVKFIRSVRSWAYETFGSEKAILLVAMATPEDMRINAEHIRIADQFVEVPGGTNNNNYANVQLILEMAEITHVDAVWPGWGHASENPELPDALKAKGIVFLGPPAISMAALGDKIGSSLIAQAAEVPTLPWSGSHVKIPPESSLITIPDEIYREACVYTTEEAVASCQVVGYPAMIKASWGGGGKGIRKVHNDDEVRALFKQVQGEVPGSPIFIMKVASQSRHLEVQLLCDQYGNVAALHSRDCSVQRRHQKIIEEGPITVAPIETVKKLEQAARRLAISVNYVGAATVEYLYSMETGEYYFLELNPRLQVEHPVTEWIAEINLPAAQVAIGMGVPLWQIPEIRRFYGVEHGGGYDAWRKTSVLATPFDFDKAQSTRPKGHCVAVRVTSEDPDDGFKPTSGKVQELNFKSKPNVWAYFSVKSGGGIHEFSDSQFGHVFAFGESRALAIANMVLGLKEIQIRGEIRTNVDYTIDLLNASDYRENKIHTGWLDSRIAMRVRAERPAWYLSVVGGALYKASASSAALVSDYVGYLEKGQIPPKHISLVHSQVSLNIEGSKYTIDMIRGGSGSYRLRMNQSEIEAEIHTLRDGGLLMQLDGNSHVIYAEEEAAGTRLLIDGRTCLLQNDHDPSKLVAETPCKLLRYLVADDSHVDADTPYAEVEVMKMCMPLLSPASGIIHFKMSEGQAMQAGELIARLDLDDPSAVRKAEPFTGSFPVLGPPTAISGKVHQKCAASLNAARMILSGYEHNIDEVVQSLLNCLDSPELPFLQWQECLAVLATRLPKELKNELESKYKEFEGISSSQIVDFPAKLLKGIIEAHLSSCPDKEKGAQERLVEPLLSLVKSYEGGRESHAHIIVQSLFDEYLSVEELFSDNIQADVIERLRLQYKKDLLKIVDIVLSHQGIKSKNKLILQLMDKLVYPNPVAYRDQLIRFSLLNHTNYSELALKASQLLEQTKLSELRSNIARSLSELEMFTEDGENIDTPKRKSAINDRMEDLVSAPFAVEDALVGLFDHSDHTLQRRVVESYIRRLYQPYLVKGSARMQWHRSGLIATWEFYDEYIERKNGVEDQSLSKTVEEKHSEKKWGVMVIIKSLQFLPAIITAALREATNNPHEALTSGSVEPVNYGNMMHIGLVGINNQMSLLQDSGDEDQAQERINKLAKILKEQEVGSTIRAAGVGVISCIIQRDEGRAPMRHSFHWSEEKLYYAEEPLLRHLEPPLSIYLELDKLKAYENIRYTPSRDRQWHLYTVVDHKPQPIQRMFLRTLVRQPTTNEGFSSYQRLDAETSRTQLAMSFTSRSIFRSLMAAMEELELNAHNVNIKSEHAHMYLYIIREQQIDDLVPYPKRINIEAGKEEITVEAVLEELAREIHSSVGVRMHRLGVVVWEIKLWMAACGQANGAWRVIVNNVTGHTCTVHLYREKEDTITHKVVYSSVSVKGPLHGVAVNENYQPLGVIDRKRLSARKNSTTYCYDFPLAFETALEQSWAIQQPGFQRAKDKNLLKVTELKFADKEGSWGTPLVPVENYPGLNDVGMVAWFMEMCTPEFPSGRTILVVANDVTFKAGSFGPREDAFFRAVTDLACTKKLPLIYLAANSGARLGVAEEVKSCFRVGWSEESNPENGFQYVYLTPEDNARIGSSVIAHELKLESGETRWVIDTIVGKEDGLGVENLSGSGAIAGAYSRAYKETFTLTYVTGRTVGIGAYLARLGMRCIQRLDQPIILTGFSALNKLLGREVYSSHMQLGGPKIMATNGVVHLTVSDDLEGVSSILKWLSYIPSHVGGALPIVKPLDPPERPVEYFPENSCDPRAAISGTLDGNGRWLGGIFDKDSFVETLEGWARTVVTGRAKLGGIPVGVVAVETQTVMQIIPADPGQLDSHERVVPQAGQVWFPDSATKTAQAILDFNREELPLFILANWRGFSGGQRDLFEGILQAGSTIVENLRTYKQPIFVYIPMMGELRGGAWVVVDSRINSDHIEMYADRTAKGNVLEPEGMIEIKFRTRELLESMGRLDQQLITLKAKLQEAKSSRNIVAFESLQQQIKSRERQLLPVYTQIATKFAELHDTSLRMAAKGVIREVLDWRNSRSVFYQRLHRRIGEQSLINSVRDAAGDQLSHASAMNLLKEWYLNSDIAKGREDAWLDDEAFFRWKDIPSNYENKLKELRVQKVLLQLTNIGDSALDLQALPQGLAALLSKLEPLGRVKLTDELRKVLG

SEQ ID NO: 548 - protein, 649 aa, Glycine max
MAGKGEGPAIGIDLGTTYSCVGVWQHDRVEIIANDQGNRTTPSYVAFTDTERLIGDAAKNQVAMNPINTVFDAKRLIGRRFSDASVQSDMKLWPFKVIPGPADKPMIVVNYKGDEKQFSAEEISSMVLIKMKEIAEAYLGSTIKNAVVTVPAYFNDSQRQATKDAGVISGLNVMRIINEPTAAAIAYGLDKKATSSGEKNVLIFDLGGGTFDVSLLTIEEGIFEVKATAGDTHLGGEDFDNRMVNHFVQEFKRKNKKDISGNARALRRLRTACERAKRTLSSTAQTTIEIDSLYEGIDFYTTITRARFEELNMDLFRKCMEPVEKCLRDAKMDKSTVHDVVLVGGSTRIPKVQQLLQDFFNGKELCKSINPDEAVAYGAAVQAAILSGEGNEKVQDLLLLDVTPLSLGLETAGGVMTVLIPRNTTIPTKKEQVFSTYSDNQPGVLIQVYEGERTRTRDNNLLGKFELSGIPPAPRGVPQITVCFDIDANGILNVSAEDKTTGQKNKITITNDKGRLSKEEIEKMVQEAEKYKAEDEEHKKKVEAKNTLENYAYNMRNTIKDDKIASKLSADDKKKIEDAIEQAIQWLDGNQLAEADEFEDKMKELESICNPIIAKMYQGAGGDAGGAMDEDGPAAGSGSGAGPKIEEVD

SEQ ID NO: 549 - protein, 514 aa, Glycine max
MGNRMNAIVLCLLVSTLLVSAVYCAPNAGLRRIGLKKIKLDPKNRLAARVGSKDVDSFRASIRQFHLQNNFGGTEETDIVALKNYLDAQYYGEIAIGTSPQKFAVIFDTGSSNLWVPSSKCTFSVACYFHAKYKSSKSSTFKKNGTAAAIQYGTGAISGFFSYDSVRVGEIVVKNQEFIEATREPGVTFLAAKFDGILGLGFQEISVGNAAPVWYNMVDQGLLKEPVFSFWFNRNPEEEEGGEIVFGGVDPAHYKGKHTYVPVTRKGYWQFDMGDVLIGGKPTGYCANGCSAIADSGTSLLAGPTTVITMINHAIGASGVMSQECKTIVAEYGQTILDLLLAETQPKKICSRIGLCAFDGTHGVDVGIKSVVDENERKSLGGHHGAACPACEMAVVWMQNQLSRNQTQDQILSYINQLCDKMPSPMGESAVDCGNISSLPVVSFTIGGRTFDLSPEEYVLKVGEGPVAQCISGFTAIDIPPPRGPLWILGDVFMGRYHTVFDFGKLRVGFADAA

SEQ ID NO: 550 - protein, 1131 aa, Glycine max
MSTSRPSQSSSNSRRSRHSARMAQATVDAKIHATFEESGSSFDYSSSVRVSGTADGVNQPRSDKVTTAYLRGKMIQPFGCLLAIDEKNHMQTCKVIAYSENEPEMLTMVSHAVPSVGDHPALGIGTDIKTLFTAPSVSGLQKALGCADVSLLNPILVHCKTSGKPFYAIVHRVTGSLIVDFEPVKPYEVPMTAAGALQSYKLAAKAITRLQSLPSGNMERLCDTMVQEVFELTGYDRVMAYKFHEDDHGEVIREITKPCLEPYLGLHYPATDIPQASRFLFRKNKVRMIVDCHAKHVRVLQDEKLQFDLILCGSTLRAPHSCHAQYMANMDSIASLVLAVVVNDNEEDGDTDAVQPQKTERLWGLVVCHNTTPRFVPFPLRYAREFLPQVFADHVHKEIELEYQIIEKNILHHPGHLLCMLMRDAPLGIASESPNIMDLVKCDGAALIYRNKVWRLGVTPSEPQIREIALWLSEYHMDSTSFSTDSLFDAGFPSALSLGDVVCGMASVRVTAKDMVFWFRSHTAAEIRWGGAKHEAGEKDDSRRMHPRSSFKAFLEVVKARSLPWKEYEMDAIHSLQIILRNAFKEDTESLDLNAKAINTRLRDLKIEGINDLKIERMQELEAVTSEIVRLDYTATVPILAVDVDGLVNGWNIKIAELTGLPIGEATGKHLLTLVEDSSTDRVKKMLNLALLGEEEKNVQFEIKTLGSKMDSGPISLVVNRCASRDLRDNVVGVCFVAHDITAQKNVMDKFIRIEGDYKAIVQNRNPLIPPIFGTDEFGWCCEWNPAMMKLTGWKREEVMDKMLLGEIFGTQMAACRLKNQEAFVNLGVVLNKAMTGSETEKVPFGFFARNGKYVECLLSVSKKLDVEGLVTGVFCFLQLASPELQQALHIQRLSEQTASKRLNALSYMKRQIRNPLCGIVFSRKMLEGTDLGTEQKQLLRTSAQCQQQLSKILDDSDLDTIIDGYLDLEMAEFTLHEVLVTSLSQVMEKSNGKSIRIVNDVAGHIMMETLYGDSLRLQQVLADFLLISINFTPNGGQVVVAGSLTKEQLGKSVHLVKLELSITHGGSGVPEVLLNQMFGNNGLESEEGISLLIRAKLLKLMNGDVRYLREAGKSAFILSAELAAAHNLKA

SEQ ID NO: 551 - protein, 209 aa, Glycine max
MVRGKTQMRRIENATSRQVTFSKRRNGLLKKAFELSVLCDAEVALIIFSPRGKLYEFASSSMQDTIERYRRHNRSAQTVNRSDEQNMQHLKQETANLMKKIELLEASKRKLLGEGLGSCSLEELQQIEQQLERSVSNVRARKNQVYKEQIDQLKEKERALYAENARLCEQYGIQPQPATKDPKEIQPYAESSPSSEVETELFIGLPRSI

SEQ ID NO: 552 - protein, 681 aa, Glycine max
MSGGGGSIVWFRRDLRIEDNPALTAGVRAGAVVAVFVWAPEEEGQYYPGRVSRWWLKNSLAHLHSSLRNLGTPLITKRSTDTLSSLLEVVKSTGATQLFFNHLYDPLSLVRDHRAKEVLTAQGITVRSFNADLLYEPWEVNDAHGRPFTTFAAFWERCLSMPYDPESPLLPPKRIIPGDASRCPSDTLLFEDELEKASNALLARAWSPGWSNANKALTTFINGPLIEYSKNRRKADSATTSLLSPHLHFGELSVKKVFHLVRIKQVLWANEGNKAGEESVNLFLKSIGLREYSRYISFNHPYSHERPLLGHLKFFPWVVNEGYFKAWRQGRTGYPLVDAGMRELWATGWLHDRIRVVVSSFFVKVLQLPWRWGMKYFWDTLLDADLESDALGWQYISGSLPDGREIDRIDNPQFEGYKFDPNGEYVRRWLPELARLPTEWIHHPWNAPESVLQAAGIELGSNYPLPIVGIDAAKTRLLEALSEMWQQEAASRAAMENGTEEGLGDSSESVPAAFPQDMQMEETHEPVRNNPLPVARRYQDQMVPSITSSLLRVEEEETSSDLRHSAEESSRAEVPVTANAQQNVGVTLNERMLQTTNRNAQTQYNTTMELRNVAEDSAVESSSGTRRERDGGVVPVWSPPASSYSEQFVGEENGITNSSSFLQRHPQSHQMLNWRQLPQTG

SEQ ID NO: 553 - protein, 558 aa, Glycine max
MESGEEINLNIESGGKSGGDGFIDRSKVRILLCDNDSKSSQEVFTLLLRCSYQVTSVKSARQVIDALNAEGQHIDIILAELDLPMKKGMKMLKYIARDKEFRRIPVIMMSAQDEVSIVVKCLRLGAADYLVKPLRTNELLNLWTHMWRRRRMLGLVEKNILNYDFDLVVSDPSDANTNSTTLFSDDTDDKSKRSTNPEAGISVQQEQESTIANAAAVEGPPDAHASECGPDVDGVNDHQTAHFSSGPKKSELRIGESSAFFTYVKASILKSNFEGVVNVDNNGATHVGMEVMHQACAQQGVNSLQILENGEACESQSQDDLPSSTSIPDSLSIERSCTPPASMEVSQQKHYREENSQQGVMHPRNGTHCSEHEVSGMASQHAYPYYISGVVNHVMMPSSAQMYHQKNIQDLQNHTSTAMISQYNHLPQGGPHGTGMTSFPYYPMSICLQPGQIPNPHSWQSFGNSSPSEAKLSKVDRREAALMKFRQKRKERCFDKKIRYINRKRLAERRPRVRGQFVRKLNGANVDLNGEPASIDYDEDDEEDEDDQGARDSSPEDA

SEQ ID NO: 554 - protein, 348 aa, Glycine max
MLDGEATMGTWARMCDTCRSAPSSVFCRAHTAFLCATCDARLHASLTWHERVWVCEACERAPAAFLCKADAASLCASCDADIHAANPLASRHHRVPILPIAAAPGNNDNDNVDDADLDDDDETASWLLLNPVKSASVPNNNNTNNGFSYNGEVDEYLDLVDDCDNHHFASVATTTDHYSHQHQHFGVVSHKSYAGDSVVPVQHHQHFQLGLEFDNSKAAFSYNASVNQSVSVSSMDIGVVPESPMRDVSIGHTRTPKGTIDLFSGPPIQVPSHFSPMDREARVLRYREKKKTRKFEKTIRYASRKAYAETRPRIKGRFAKRTDVEAEVDQMFSTTLITEVGYGIVPSF

SEQ ID NO: 555 - protein, 625 aa, Glycine max
MVDYYKAVTKDKEDVRNTGKRLKCMRNEEEEVYEEEESELPLKPGFFFYPTTPTSFVVSDALEPDFPIIYVNKVFEISTGYRADEALGRNCRFLQYRDPRAQRRHPLVDPVVVSEIRRCLEEGVEFQGELLNFRKDGTPLVNRLRLAPIHDDDGTVTHVIGIQLFSEANIDLNRVSYPVFKETCNQDFDKTGKYNPKSGQSLYSQHQEMCGILQLSDEVLAHNILSRLTPRDVASIGSVCRRIRQLTKNEHVRKMVCQNAWGKEVTGTLELMTKKLGWGRLTRELTTLEAVCWRKLTVGGAVEPSRCNFSACAAGNRLVLFGGEGVDMQPMDDTFVLNLDAKNPEWRRVSVKSSPPGRWGHTLSCLNGSWLVVFGGCGRQGLLNDVFVLDLDAQQPTWREVCGGTPPLPRSWHSSCTIEGSKLVVSGGCTDAGVLLSDTYLLDLTTDNPTWREIPTSWAPPSRLGHSLSVYGRTKILMFGGLAKSGHLRLRSGEAYTIDLEDEQPQWRQLEYSAFTGLASQSAVVPPPRLDHVAVSMPCGRIIIFGGSIAGLHSPSQLFLLDPSEEKPSWRILNVPGQPPKFAWGHSTCVVGGTRVLVLGGHTXEEWILNELHELCLASRQDSDL

SEQ ID NO: 556 - protein, 222 aa, Glycine max
MGRGKIEIKRIENTTNRQVTFCKRRNGLLKKAYELSVLCDAEVALIVFSSRGRLYEYSNNNIRSTIERYKKACSDHSSASTTTEINAQYYQQESAKLRQQIQMLQNSNRHLMGDALSTLTVKELKQLENRLERGITRIRSKKHEMLLAEIEYFQKREIELENENLCLRTKITDVERIQQVNMVSGPELNAIQALASRNFFNPNMLEGGTVYPHSDKKILHLG

SEQ ID NO: 557 - protein, 190 aa, Glycine max; identical to SEQ ID NO: 502

SEQ ID NO: 558 - protein, 1175 aa, Glycine max
MSSASSLMAASSERWIDRLQYSSLFWPPPPDGQQRKDQIAAYVEYFIQFTSEQFADDIAELIRNRYPSKDILLFDDVLATFVLHHPEHGHAVVLPIISCIIDGTLVYDKASPPFASFISSVCPKIENEYSEQWALACGEILRILTHYNRPIYKTERQSGETERSTSGSHATTSEPGKSGHNSLTQQEKKPIRPLSPWITDILLSSPVGIRSDYFRWCSGVMGKYAAGELKPPSTASSRGSGKHPQLVPSTPRWAVANGAGVILSVCDDEVARNETTTLTAAAVPALLLPPPTTALDEHLVAGLPALEPYARLFHRYYAIATPSATQRLLLGLLEAPPSWAPDALDAAVQLVELLRAAEDYASGIRLPRNWMHLHFLRAIGTAMSMRAGIAADAAAALLFRILSQPALLFPPLRQVDGVEVQHEPLGGYISSYKKQIEVPAAEASIEATAQGIASMLCAHGPEVEWRICTIWEAAYGLIPTSSSAVDLPEIIVATPLQPPILSWNLYIPLLKVLEYLPRGSPSEACLMKIFAATVEAILQRTFPPESTREQNRKSKYLAGIGSASKNLAMAELRTMVHSLFLESCASVELASRLLFVVLTVCVSHEAQFSGSKRPRGEDNYSAEDIIEDLQTSENQKVSKNRKLKKQGPVAAFDSYVLAAVCALACELQLFPLISCGNNRLASNNVQDIAKPVRLNGSSHELQNGLDSAMRHTHRILAILEALFSLKPSSVGTPWSYSSNEIVAAAMVAAHVSELFRRSKTCMHALSVLIRCKWDNEIHSRASSLYNLIDIHSKAVASIVNKAEPLEATLIHVPIWKDSLVCVGVKRQNQCESSSCFAPGQTSVVPSEDSFPSKVDHNSQKTPCSKDASDYTLGKGVTGFSLDASDLANFLTMDRHIGLNCNGQIFLRSTLAEKQELCFSVVSLLWHKLIASPETQPCAESTSAQQGWRQVVDALCNVVSASPTKAATAVVLQAERELQPWIAKDDDLGQKMWRINQRIVKLIVELMRNHETSESLVIVASSSDLLLRATDGMLVDGEACTLPQLELLEATARAVQPVLEFGESGLAVADGLSNLLKCRLSATIRCLSHPSAHVRALSISVLRDILHTGSIRCSPKPRRLNGTHNPSYQYFNLDVIDWQADIEKCLTWEAHSRLSNGLSINFLDTAAKELGCTISM

SEQ ID NO: 559 - protein, 175 aa, Glycine max; identical to SEQ ID NO: 506

SEQ ID NO: 560 - protein, 865 aa, Glycine max
MDPPLQFSSPQNPNPNPNHNVFLDPTSDSIPNLLQNPIHYLSFSVPKKRRRGRSQRNPASFRLPPLTTLPTAANPSPSASDEIIFINKEPKTEALIALTAGFPADSLTEEEIDAAVLPVIGGIEQVNYTLIRNHIIAKWRENVSNWVSKKTFLDYIPPHYHSLLDSAYNYLVSHGYINFGVASSIKERVPAEASRPAVIVVGAGLAGLAAARQLLRFGFKVTVLEGRKRAGGRVYTKKMEGGNRMCAAADLGGSVLTGTLGNPLGIVARQLGELLHKVRDKCPLYCVNGMPVDPDMDVKVESAFNRLLDKASRLRQLMGEVSVDVSLGAALETFSQVYKDAVSDEEMNLFNWHLANLEYANAGLLSNLSLAFWDQDDPYDMGGDHCFLPGGNGKLVQALSENVPILYEKTVHMIRYSGDGVQVTAGSQVFEGDMALCTVPLGVLKKGFIKFIPELPQRKLDGIKRLGFGLLNKVAMLFPHVFWEMDLDTFGHLSDDPSRRGEFFLFYSYVTVAGGPLLIALVAGEAAHKFESMPPTDAVTRVLQILKGIYEPKGITVPEPIQTVCTRWGSDPFCFGSYSNVAVGASGDDYDILAESVGDGRLFFAGEATTRRYPATMHGAFLSGLREAANMAHHDNIRTLKMKVDKAPSNAHSCASLLADLFREPDIEFGSFSVIFARKNTDPKSPAILRVTFNEARKKCHEVAKQDQQHSNKLLFQQLQSHFNQQQQLHVYTLLSRQQVIDLREVRGGDEMRLNYLCEKLGVKLVGRKGLGMNADSIIDSIKAERGNRKPVSTSLALKPGVSSKLKAAGIMKRKLVRRAKVVRKSNGSINVRSAIKVSEEVKITNQVLPDVPVSGSNQNDLTNS

SEQ ID NO: 561 - protein, 714 aa, Glycine max
MKRGKDDEKVMGPMFPRLHVNDTEKGGPRAPPRNKMALYEQFSIPSQRFNSGVLPLNPNISSNTVPPASSSLRTVPERNCVYPVHLPPQRPIHRAEKCNSRQSEGTNLSASLEQRKKVDEDDFRVPVYFHSRTGQCNDKSVESFNGKKLTPTGSRYFGGSISGQSDCERDPKQFGSSVVNMRKDVRSEIDVLPQVSTSKEQASMSVRSISTRENIHTLLRQAKVTPNREFQDCHVSKFNRLQQGETCLQLECGVESRSNDIGDNGCLVESARETDKGNAPTANQTSPADAINDTEHHDTRMGSPIQRGNLNESDNASKISMVENLSTVRISPDDVVGIIGQKHFWKARRAIANQQRVFAVQVFELHRLIKVQQLIAGSPDILLEDGAFLGKSPPKGSTPKKLALEYVVKPRQQNLKRKDDSEKLNHKMECSAENAVGKTSLSSVKDGSHLSKCTPFPGNQHQTNVAADSGMGPWCFNQSPPGHPWLIPVMTPSEGLVYKPYPGPGFTGTGCGGGCGPFVPALLGGSFMNPGYGIPTSHQGVGVPPDTHPGSHGYLPPYGMPVMNSSMSESVVEQGNQFSALGSHGHNGHLPGGGKANHNTNNKSSCNLPVQRNGAISHVLKHQTSKDFELQETSASSPSEMAQGLSTGQVAEGRDVLPLFPMVPAEPESVPQSLETGQHTRVIKVVPHNRRSATASAARIFQSIQEGRKQNDSV

SEQ ID NO: 562 - protein, 421 aa, Glycine max
MLHCLNTSGNLGATCSDMTVLERQREATIKWQQHLQNNQPPYLTDFNVNVNAVFSSSSSSSQSQGLVMNICADSALGEVLTHSVKPDPGVWPEFDAGFGSSSGFLPTISPTCSRGGDLVSPKENMASAKENTKKRKPQNSKVVVAASDNKQDKRVKASGEEGESKVTEQTSNKNGKSNANKNNNRETTSAETSKDNSKGSEVQNQKPEYIHVRARRGQATDSHSLAERVRREKISERMKYLQDLVPGCNKVAGKAGMLDEIINYVQSLQRQVEFLSMKLAAVNPRLDFNLDELFTKEVFPSCAQSFPNIGMPLDMSMSNNPSYLPFNSAQQLVSCCGGLINNMGISPPNMGLRRNISTSPVPLPETFLDSSCFTQILPSSNWEGGDFQSLYNVAFDQGRTASFPSQPFTGLVEASNLKMEM

SEQ ID NO: 563 - protein, 172 aa, Glycine max; identical to SEQ ID NO: 512

SEQ ID NO: 564 - protein, 353 aa, Glycine max
MDPDAFTASLFKWDPRTVLPPAPAPPPRPSLLEYAMAPPPVTTAFHPARTAAPRELGGLEELFQAYGIRYYTAAKIAELGFTVSTLVDMKDEELDDMMNSLSQIFRWDLLVGERYGIKAAVRAERRRVEDDDIKRRNNNSNNLLSTDTTTNALDALSQEGLSEEPVVQGETEAEGSGGRKAKRTPFIVTDPGEVARGKKNGLDYLFHLYEQCREFLMQVQAIAKDRGEKCPTKVTNQVFRYAKKAGASYINKPKMRHYVHCYALHCLDEEVSNELRRAFKERGENVGAWRQACYKPLVAIAARQGWDIDAIFNAHPRLSIWYVPTKLRQLCHAERNSVSASSSVSAGSAHLPF

SEQ ID NO: 565 - protein, 1137 aa, Glycine max
MASASGAANSSVPPPQIHTSRTKLSHHSSNNNNNIDSMSKAIAQYTEDARLHAVFEQSGESGRSFNYSESIRIASESVPEQQITAYLVKIQRGGFIQPFGSMIAVDEPSFRILGYSDNARDMLGITPQSVPSLDDKNDAAFALGTDVRALFTHSSALLLEKAFSAREISLMNPIWIHSRTSGKPFYGILHRIDVGIVIDLEPARTEDPALSIAGAVQSQKLAVRAISQLQSLPGGDVKLLCDTVVESVRELTGYDRVMVYKFHEDEHGEVVSESKRPDLEPYIGLHYPATDIPQASRFLFKQNRVRMIVDCHASAVRVVQDEALVQPLCLVGSTLRAPHGCHAQYMANMGSIASLVMAVIINGNDEEGVGGRSSMRLWGLVVCHHTSARCIPFPLRYACEFLMQAFGLQLNMELQLAAQSLEKRVLRTQTLLCDMLLRDSPTGIVTQSPSIMDLVKCDGAALYFQGNYYPLGVTPTEAQIRDIIEWLLAFHGDSTGLSTDSLGDAGYPGAASLGDAVCGMAVAYITEKDFLFWFRSHTAKEIKWGGAKHHPEDKDDGQRMHPRSSFKAFLEVVKSRSLPWENAEMDAIHSLQLILRDSFKDAEHRNSKAVVDPHVSEQELQGVDELSSVAREMVRLIETATAPIFAVDVDGHVNGWNAKVSELTGLPVEEAMGKSLVHDLVFKESEETMNKLLSRALKGEEDKNVEIKMRTFGPEHQNKAVFLVVNACSSKDFTNNVVGVCFVGQDVTGQKIVMDKFINIQGDYKAIVHSPNPLIPPIFASDDNTCCLEWNTAMEKLTGWGRVDVIGKMLVGEVFGSCCQLKGSDSITKFMIVLHNALGGQDTDKFPFSFLDRHGKYVQTFLTANKRVNMEGQIIGAFCFLQIMSPELQQALKAQRQQEKNSFGRMKELAYICQGVKNPLSGIRFTNSLLEATSLTNEQKQFLETSVACEKQMLKIIRDVDLESIEDGSLELEKGEFLLGNVINAVVSQVMLLLRERNLQLIRDIPEEIKTLAVYGDQLRIQQVLSDFLLNIVRYAPSPDGWVEIHVRPRIKQISDGLTLLHAEFRMVCPGEGLPPELIQDMFNNSRWGTQEGLGLSMSRKILKLMNGEVQYIREAERCYFYVLLELPVTRRSSKKC

SEQ ID NO: 566 - protein, 1170 aa, Glycine max
MAASSERWIDRLQYSSLFWPPPPDGQQRKDQIAAYVEYFIQFTSEQFADDIAELIRNHYPSKDILLFDDVLATFVLHHPEHGHAVVLPIISCIIDGTLVYDKASPPFASFISSVCPKIENEYSEEWALACGEILRILTHYNRPIYKTERQSGETERSTSGSHATTSEPGKSGHNSLTQHEKKPIRPLSPWITDILLASPVGIRSDYFRWCSGIMGKYAAGELKPPSTASSRGSGKHPQLVPSTPRWAVANGAGVILSVCDDEVARNETATLTAAAVPALLLPPPTTALDEHLVAGLPALEPYARLFHRYYAIATPSATQRLLLGLLEAPPSWAPDALDAAVQLVELLRAAEDYASGIRLPRNWMHLHFLRAIGTAMSMRAGIAADAAAALLFRILSQPALLFPPLRQVDGVEVQHEPLGGYISSYKKQIEVPAAEASIEATAQGIASMLCAHGPEVEWRICTIWEAAYGLIPTSSSAVDLPEIIVATPLQPPVLSWNLYIPLLKVLEYLPRGSPSEACLMKIFAATVEAILQRTFPPESTREQNRKSKYLAGIGFGSASKNLAVAELRTMVHSLFLESCASVELASRLLFVVLTVCVSHEAQFSGSKRPRGEDNYSSEDIIEDLQTSENQKESKNRKLKKQGPVAAFDSYVLAAVCALACELQLFPLISRGNNHLASNKVQDIAKPVRLNGSSHELRNGLDSAVRHTHRILAILEALFSLKPSSVGTPWSYSSNEIVAAAMVAAHVSELFRRSKACMHALSVLIRCKWDNEIHSRASSLYNLIDIHSKAVASIVNKAEPLEATLIHAPIRKDSLVCVGVKRQNQCESSSCFDAGRTSVVPSEDSFPSKLDHNSNKTPCPKGASDYTLGKGVTGFSLDASDLANFLTMDRHIGLNCNGQIFLRSTLAEKQELCFSVVSLLWHKLIASPETQPCAESTSAQQGWRQVVDALCNVVSASPTKAATAVVLQAERELQPWIAKDDDSGQKMWRINQRIVKLIVELMRNHETAESLVIVASSSDLLLRATDGMLVDGEACTLPQLELLEATARAVQPVLEFGESGLAVADGLSNLLKCRLSATIRCLSHPSAHVRALSISVLRDILHTGSIRCSPKPRRLNGTHNPSYQYFNLDAVDWQADIEKCLTWEAHSRLSNGLSINFLDIAAKELGCTISM

SEQ ID NO: 567 - protein, 264 aa, Glycine max
MARGLKKHLKRLNAPKHWMLDKLGGAFAPKPSSGPHKSRECLPLILILRNRLKYALTYREVIAILMQRHVLVDGKVRTDKTYPAGFMDVVSIPKTNENFRLLYDTKGRFRLHSVRDEESKFKLCKVRSVQFGQKGIPYLNTYDGRTIRYPDPLIKANDTIKLDLESNKITDFIKFDVGNVVMVTGGRNRGRVGVIKNREKHKGSFETIHVQDATGHEFATRMGNVFIIGKGTKPWVSLPKGKGIKLSIIEEARKRLAAQNETVA

SEQ ID NO: 568 - protein, 175 aa, Glycine max; identical to SEQ ID NO: 513

SEQ ID NO: 569 - protein, 533 aa, Glycine max
MKKDIEDEVLPNDMSGAQLNDESYEGSAGIVLKKGPWTSTEDDILVDYVKKHGEGNWNAVQKHTGLFRCGKSCRLRWANHLRPNLKKGAFAAEEERLIAELHAKMGNKWARMAAHLPGRTDNEIKNYWNTRIKRRQRAGLPLYPPEVSLHALQESQHSQSTGGLNGGDKMHPDFLQKNSYEIHDAIFDSLKDNQGILPYVHELSDISVYGNKLKGLDSSQYCSFVPPTSPKRKRLKESTIPFIDSCAMKKKDLYPFDQIQDNNSDKIAQSFGMQAPLDPGLSSHSSMCYSHSLSNGNSSTSKPYEAMKLELPSLQYPELDLGSWGSSPPPSLLESVDDFLQSPTAISTLESDCSSPQNSGLLDALLYQAKTMSSSKNHCSDKSSNSSTATPGDRADSSILNVYETEWEDYADPVSPFGATSILNECPALRANANSLNGQLPVQTFTGNLPKLESVDQVWTPNNENLTLSLLNITRPDFLLASDWYDLGSGHCKNQTITTDAATAFLGDDLATDLKHMTAGISKTMFENPFQPL

SEQ ID NO: 570 - protein, 176 aa, Glycine max; identical to SEQ ID NO: 515

SEQ ID NO: 571 - protein, 193 aa, Glycine max
MSLQSQSPSKFTTLFISSNMSNPSDEREQCQKKTKSTICEASNFRTSRRRFCSNNKNEEEMNNKGVSTTLKLYDDPWKIKKTLTDSDLGILSRLLLAADLVKKQILPMLGAYHARAAETEGTPVRVWDMDTKSMHQLVLKRWSSSKSYVLIGKWNQDFVRRRDLRKGDEIGFHWDPYNCVFNFCVLKQAMPEN

SEQ ID NO: 572 - protein, 192 aa, Glycine max
MSLQSQIPSKFKIIFISSNMSNPSDEKEQCQKKRKSTICEASNFKTSRRRFFSNKNEEDMNKGVSTTLKLYDDPWKIKKTLTDSDLGILSRLSLAADLVKKQILPMLGADHARAAETEEGTPVRVWDMDTKSMHQLVLKRWSSSKSYVLIGKWNQDFVRRRDLKKGDEIGFHWDPYNCVFNFCVLKRAMPEN

SEQ ID NO: 573 - protein, 192 aa, Glycine max
MSLQSQIPSKFKIIFISSNMSNHSDEKEQCQKKRKSTICEASNFRTSRRRFCSNKNEEEMNKGVSTTLKLYDDPWKIKKTLTDSDLGILSRLSLATDLVKKQILPMLGADHARAAETEEGTPVRVWDMDTKSMHQLVLKRWSSSKSYVLIAKWNQDFVRRRDLKKGDEIGFHWDPYNCVFNFCVLKRAMPEN

SEQ ID NO: 574 - protein, 510 aa, Glycine max
MFIENFKVECPNVKYTETEIQSVYNYETTELVHENRNGTYQWIVKPKSVKYEFKTNIHVPKLGVMLVGWGGNNGSTLTGGVIANREGISWATKDKIQQANYFGSLTQASAIRVGSFQGEEIYAPFKSLLPMVNPDDIVFGGWDISNMNLADAMARAKVFDIDLQKQWRPYMESMLPLPGIYDPDFIAANQEERANNVIKGTKQEQVQQIIKDIKAFKEATKVDKVVVLWTANTERYSNLVVGLNDTMENLLAAVDRNEAEISPSTLYAIACVMENVPFINGSPQNTFVPGLIDLAIARNTLIGGDDFKSGQTKMKSVLVDFLVGAGIKPTSIVSYNHLGNNDGMNLSAPQTFRSKEISKSNVVDDMVNSNAILYEPGEHPDHVVVIKYVPYVGDSKRAMDEYTSEIFMGGKSTIVLHNTCEDSLLAAPIILDLVLLAELSTRIEFKAENEGKFHSFHPVATILSYLTKAPLVPPGTPGVNALSKQRAMLENIMRACVGLAPENNMILEYK

SEQ ID NO: 575 - protein, 516 aa, Glycine max
MSGSHQEQPLLENSFIEEDEPQETAYDSSEKIVVVGVDEFDDEENWGRVPRFSWKKLWLFTGPGFLMSIAFLDPGNLEGDLQAGAIAGYSLLWLLMWATAMGLLIQLLSARLGVATGKHLAELCREEYPPWARIVLWIMAELALIGSDIQEVIGSAIAIRILSHGVVPLWAGVVITALDCFIFLFLENYGVRTLEAFFAILIGVMAISFAWMFGEAKPSGKELLLGVLIPKLSSKTIQQAVGVVGCLIMPHNVFLHSALVQSRQVDRSKKGRVQEALNYYSIESTLALVVSFIINIFVTTVFAKGFYGSELANSIGLVNAGQYLEETYGGGLFPILYIWGIGLLAAGQSSTITGTYAGQFIMGGFLNLRLKKWMRALITRSCAIIPTMIVALLFDTSEESLDVLNEWLNVLQSVQIPFALIPLLCLVSKEQIMGTFRIGAVLKTTSWLVAALVIVINGYLLTEFFSSEVNGPMIGTVVGVITAAYVAFVVYLIWQAITYLPWQSVTQPKTIAHSEG

SEQ ID NO: 576 - protein, 866 aa, Glycine max
MFSVPGVSGILNRGGGHKIKGTVVLMRKNVLDFNSVADLTKGNVGGLIGTGLNVVGSTLDNLTAFLGRSVALQLISATKPLANGKGKVGKDTFLEGIIVSLPTLGAGESAFNIQFEWDESMGIPGAFYIKNYMQVEFYLKSLTLEDVPNQGTIRFVCNSWVYNTKLYKSVRIFFANHTYVPSETPAALVGYREEELKNLRGDGKGERKEHDRIYDYDVYNDLGNPDHGENFARPILGGSSTHPYPRRGRTGRYPTRKDQNSEKPGEVYVPRDENFGHLKSSDFLAYGIKSLSQYVLPAFESVFDLNFTPNEFDSFQDVRDLHEGGIKLPTEVISTIMPLPVVKELFRTDGEQVLKFPPPHVIQVSKSAWMTDEEFAREMVAGVNPCVIRGLQEFPPKSNLDPTIYGEQTSKITADALDLDGYTVDEALASRRLFMLDYHDVFMPYIRRINQTYAKAYATRTILFLRENGTLKPVAIELSLPHPAGDLSGAVSQVILPAKEGVESTIWLLAKAYVVVNDSCYHQLMSHWLNTQAVIEPFIIATNRHLSALHPIYKLLTPHYRDTMNINALARQSLINADGIIEKSFLPSKHSVEMSSAVYKNWVFTDQALPADLIKRGVAIKDPSAPHGLRLLIEDYPYAVDGLEIWAAIKTWVQEYVSLYYARDDDVKPDSELQQWWKEAVEKGHGDLKDKPWWPKLQTIEELVEICTIIIWTASALHAAVNFGQYPYGGFILNRPTSSRRLLPEKGTPEYEEMVKSHQKAYLRTITSKFQTLVDLSVIEILSRHASDEVYLGQRDNPHWTSDSKALQAFQKFGNKLKEIEEKLARKNNDQSLSNRLGPVQLPYTLLHPNSEEGLTCRGIPNSISI

SEQ ID NO: 577 - protein, 411 aa, Glycine max; identical to SEQ ID NO: 525

SEQ ID NO: 578 - protein, 857 aa, Glycine max
MLGGLLHRGHKIKGTVVLMRKNVLDVNSVTSVGGIIGQGLDLVGSTLDTLTAFLGRSVSLQLISATKADANGKGKLGKATFLEGIITSLPTLGAGQSAFKINFEWDDGSGIPGAFYIKNFMQTEFFLVSLTLEDIPNHGSIHFVCNSWIYNAKLFKSDRIFFANQTYLPSETPAPLVKYREEELHNLRGDGTGERKEWERIYDYDVYNDLGDPDKGENHARPVLGGNDTFPYPRRGRTGRKPTRKDPNSESRSNDVYLPRDEAFGHLKSSDFLTYGLKSVSQNVLPLLQSAFDLNFTPREFDSFDEVHGLYSGGIKLPTDIISKISPLPVLKEIFRTDGEQALKFPPPKVIQVSKSAWMTDEEFAREMLAGVNPNLIRCLKDFPPRSKLDSQVYGDHTSQITKEHLEPNLEGLTVDEAIQNKRLFLLDHHDPIMPYLRRINATSTKAYATRTILFLKNDGTLRPLAIELSLPHPQGDQSGAFSQVFLPADEGVESSIWLLAKAYVVVNDSCYHQLVSHWLNTHAVVEPFIIATNRHLSVVHPIYKLLHPHYRDTMNINGLARLSLVNDGGVIEQTFLWGRYSVEMSAVVYKDWVFTDQALPADLIKRGMAIEDPSCPHGIRLVIEDYPYTVDGLEIWDAIKTWVHEYVFLYYKSDDTLREDPELQACWKELVEVGHGDKKNEPWWPKMQTREELVEACAIIIWTASALHAAVNFGQYPYGGLILNRPTLSRRFMPEKGSAEYEELRKNPQKAYLKTITPKFQTLIDLSVIEILSRHASDEVYLGERDNPNWTSDTRALEAFKRFGNKLAQIENKLSERNNDEKLRNRCGPVQMPYTLLLPSSKEGLTFRGIPNSISI

SEQ ID NO: 579 - protein, 581 aa, Glycine max
MCGILAVLGCSDDSRAKRVRVLELSRRLKHRGPDWSGLHQHGDCFLAHQRLAIVDPASGDQPLFNEDKSVIVTVNGEIYNHEELRKQLPNHNFRTGSDCDVIAHLYEEHGEDFVDMLDGIFSFVLLDTRDNSFIVARDAIGVTSLYIGWGLDGSVWISSEMKGLNDDCEHFECFPPGHLYSSKERGFRRWYNPPWFSEAIPSAPYDPLVLRHAFEQAVIKRLMTDVPFGVLLSGGLDSSLVASITSRYLANTKAAEQWGSKLHSFCVGLEGSPDLKAAKEVADYLGTVHHEFTFTVQDGIDSIEDVIYHIETYDVTTIRASTPMFLMSRKIKSLGVKWVISGEGSDEIFGGYLYFHKAPNKEEFHRETCRKIKALHQYDCLRANKSTFAWGLEARVPFLDKAFINAAMSIDPEWKMIKRDEGRIEKWILRRAFDDEEHPYLPKHILYRQKEQFSDGVGYSWIDALKAHPPKHVTEKMMLNAGNIYPHNTPKTKEAYYYRMIFERFFPQNSARLTVPGGASAACSTAKAVEWDAAWSNNLDPSGRAALGVHISAYENQNNKGVEIEKIIPMDAAPLGVAIQG

SEQ ID NO: 580 - protein, 579 aa, Glycine max
MCGILAVLGCSDSSQAKRVRVLELSRRLKHRGPDWSGLHQYGDNYLAHQRLAIVDPASGDQPLFNEDKTVVVTVNGEIYNHEELRKQLPNHTFRTGSDCDVIAHLYEEHGENFMDMLDGIFSFVLLDTRDNSFIVARDAIGVTSLYIGWGLDGSVWISSELKGLNDDCEHFESFPPGHLYSSKERAFRRWYNPPWFSEAIPSAPYDPLALRHAFEKAVVKRLMTDVPFGVLLSGGLDSSLVAAVTARYLAGTKAAKQWGTKLHSFCVGLEGAPDLKAAKEVAEYIGTVHHEFHYTVQDGIDAIEDVIYHIETYDVTTIRASIPMFLMSRKIKSLGVKMVISGEGSDEIFGGYLYFHKAPNKEEFHQETCRKIKALHKYDCLRANKSTFAWGLEARVPFLDKEFIRVAMNIDPECKMIKKEEGRIEKWALRRAFDDEEHPYLPKHILYRQKEQFSDGVGYGWIDGLKAHAEKHVTDRMMLNAANIFPFNTPTTKEAYHYRMIFERFFPQNSARLTVPGGPSVACSTAKAVEWDAAWSNNLDPSGRAALGVHASAYGNQVKAVEPEKIIPKMEVSPLGVAI

SEQ ID NO: 581 - protein, 839 aa, Glycine max
MFSAGHKIKGTVVLMPKNELEVNPDGSAVDNLNAFLGRSVSLQLISATKADAHGKGKVGKDTFLEGINTSLPTLGAGESAFNIHFEWDGSMGIPGAFYIKNYMQVEFFLKSLTLEAISNQGTIRFVCNSWVYNTKLYKSVRIFFANHTYVPSETPAPLVSYREEELKSLRGNGTGERKEYDRIYDYDVYNDLGNPDKSEKLARPVLGGSSTFPYPRRGRTGRGPTVTDPNTEKQGEVFYVPRDENLGHLKSKDALEIGTKSLSQIVQPAFESAFDLKSTPIEFHSFQDVHDLYEGGIKLPRDVISTIIPLPVIKELYRTDGQHILKFPQPHVVQVSQSAWMTDEEFAREMIAGVNPCVIRGLEEFPPKSNLDPAIYGDQSSKITADSLDLDGYTMDEALGSRRLFMLDYHDIFMPYVRQINQLNSAKTYATRTILFLREDGTLKPVAIELSLPHSAGDLSAAVSQVVLPAKEGVESTIWLLAKAYVIVNDSCYHQLMSHWLNTHAAMEPFVIATHRHLSVLHPIYKLLTPHYRNNMNINALARQSLINANGIIETTFLPSKYSVEMSSAVYKNWVFTDQALPADLIKRGVAIKDPSTPHGVRLLIEDYPYAADGLEIWAAIKTWVQEYVPLYYARDDDVKNDSELQHWWKEAVEKGHGDLKDKPWWPKLQTLEDLVEVCLIIIWIASALHAAVNFGQYPYGGLIMNRPTASRRLLPEKGTPEYEEMINNHEKAYLRTITSKLPTLISLSVIEILSTHASDEVYLGQRDNPHWTSDSKALQAFQKFGNKLKEIEEKLVRRNNDPSLQGNRLGPVQLPYTLLYPSSEEGLTFRGIPNSISI

SEQ ID NO: 582 - protein, 413 aa, Glycine max
MGSLGAILKHPDDFYPLLKLKMAARNAEKQIPPEPHWAFCYTMLHKVSRSFALVIQQLGIELRNAVCIFYLVLRALDTVEDDTSIETDVKVPILIAFHRHIYDRDWHFSCGTKEYKVLMDQFHHVSTAFLELGKNYQEAIEDITKRMGAGMAKFICKEVETIDDYDEYCHYVAGLVGLGLSKLFHASGSEDLAPDDLSNSMGLFLQKTNIIRDYLEDINEIPKSRMFWPRQIWSEYVNKLEDLKYEENSVKAVQCLNDMVTNALMHPEDCLKYMAALRDPPIFRFCAIPQIMAIGTLALCYNNIEVFRGVVKMRRGLTAKVIDRTKTMADVYGAFFDFASMLEPKVDKNDPNATKTLSRLEAIQKTCRESGLLSKRKSYIVNDESGYGSTMIVILVIMVSIIFAYLSANHHNS

SEQ ID NO: 583 - protein, 530 aa, Glycine max
MAEIEGSPGSSMHGVTGREQTFVASVASPIVPTDTTAKFALPVDSEHKAKVFKLFSLANPHMRTFHLSWISFFTCFVSTFAAAPLVPIIRDNLNLTKSDIGNAGVASVSGSIFSRLAMGAVCDMLGPRYGCAFLIMLSAPTVFCMSFVKDAAGYIAVRFLIGFSLATFVSCQYWMSTMFNSKIIGLANGTAAGWGNMGGGATQLIMPLVYELIRRAGATPFTAWRIAFFVPGFMHVIMGILVLTLGQDLPDGNLGALRKKGDVAKDKFSKVLWYAITNYRTWIFALLYGYSMGVELTTDNVIAEYFYDRFNLKLHTAGIIAASFGMANLVARPFGGYASDVAARLFGMRGRLWTLWILQTLGGVFCIWLGRANSLPIAVLAMILFSIGAQAACGATFGIIPFISRRSLGIISGLTGAGGNFGSGLTQLVFFSTSKFSTATGLSLMGVMIVACTLPVSVVHFPQWGSMFLPPSKDVSKSTEEFYYTSEWNEEEKQKGLHQQSLKFAENSRSERGKRVASAPTPPNATPTHV

SEQ ID NO: 584 - protein, 355 aa, Glycine max
MSLLSDLINLNLSDTTEKVIAEYIWIGGSGMDLRSKARTLPGPVSDPSELPKWNYDGSSTGQAPGEDSEAIYTHKPFQDPFRRGNNILVICDAYTPAGEPIPTNKRHAAAKVFSHPDVVAEVPWYGIEQEYTLLQKDIQWPLGWPVGGFPGPQGPYYCGVGADKAFGRDIVDAHYKACIYAGINISGINGEVMPGQWEFQVGPSVGISAGDEIWAARYILERITEIAGVVVSFDPKPIPGDWNGAGAHTNYSTKSMREDGGYEVIKAAIDKLGKKHKEHIAAYGEGNERRLTGRHETADINTFLWGVANRGASVRVGRDTEKAGKGYFEDRRPASNMDPYVVTSMIADTTILWKP

SEQ ID NO: 585 - protein, 456 aa, Glycine max
MALTLKEEDAADWVYRGEGAVNLVLAYAGSSPSFIGKVVRIRKAPRNGSQSKSVSVRNSIALTPHERVLWKDVHQLISSSDKEIVGQLYVQHVMKPLLGSNSVDAGMHVLVTREFLELVEKNVSGQRPAWRVEAARVDAHCDFGLLMSDHSLFAYGSQGSSLCLSVEIKPKCGFLPLSRFISEVNAIKRRITRFEMHQTLKLLQGEISQLSEYNPLDLFSGSKERILKAIKGLLTTPQNNFRVFLNGSLILGGLGGVAKNTDVCIAKAFEDELKSIIRADDDLCTNNLSTLVTEALQKSGVLDKLLKVQKLDNIDIEGVIHAYYNITSQQCMVCKELSEEQAKIYTPLHSASLDESLRIVKDYLIATTAKDCSLMLCFRPRNEEDSGSVYDNVYLDSTEQSFDYKVYFIDLDLKRLSKVEDYYELDKKIVNCYRQIIKMDQGRNEETGLKASNAAY

SEQ ID NO: 586 - protein, 402 aa, Glycine max
MLPLLHLTHSSMALRLNPIPTQTFSLPQMPSLRSPRFRMASTLRSGSKEVENIKKPFTPPREVHVQVTHSMPPQKIEIFKSLEDWADQNILTHLKPVEKCWQPQDFLPDPSSDGFEEQVKELRERAKEIPDDYFVVLVGDMITEEALPTYQTMLNTLDGVRDETGASLTSWAIWTRAWTAEENRHGDLLNKYLYLSGRVDMKQIEKTIQYLIGSGMDPRTENSPYLGFIYTSFQERATFISHGNTARLAKEHGDIKLAQICGMIASDEKRHETAYTKIVEKLFEVDPDGTVMAFADMMRKKIAMPAHLMYDGRDDNLFDNYSAVAQRIGVYTAKDYADILEFLVGRWKVEQLTGLSGEGRKAQEYVCGLPPRIRRLEERAQARGKESSTLKFSWIHDREVLL

SEQ ID NO: 587 - protein, 211 aa, Glycine max
MLRFSSQIERLSPTLSAGSVSTIGNSTSNVAAVVSSKTRIRWTKDLHEKFVECVNRLGGAEQATPKAILKMMNTDGLTIFHVKSHLQKYRIAKFIPEPSHGKSDKRAHTKDVHHLDVKTGIQIREALKLQLDAQRCLHEQLEIQRKLQLRIEEQGRQLKKMFDQQQKTSNDVSNTQNSTIEETSISHKDGENASEGANNNSFFPSKTSPSQ

SEQ ID NO: 588 - protein, 413 aa, Glycine max
MGSLGAILKNPDDFYPLLKLKMAARNAEKQIPPEPHWAFCYTMLHKVSRSFALVIQQLGTELRNAVCIFYLVLRALDTVEDDTSIETDVKVPILIAFHRHIYDRDWHFSCGTKEYKVLMDQFHHVSTAFLELGKNYQEAIEDITKRMGAGMAKFICKEVETIDDYDEYCHYVAGLVGLGLSKLFHASGSEDLAPDDLSNSMGLFLQKTNIIRDYLEDINEIPKSRMFWPRQIWSKYVNKLEDLKYEENSVKAVQCLNDMVTNALMHAEDCLTYMAALRDPPIFRFCAIPQIMAIGTLALCYNNIEVFRGVVKMRRGLTAKVIDRTTTMADVYGAFFDFASMLESKVDKNDPNATKALSRLEAIQKTCRESGLLSKRKSYIVKDESGYGSTMIIVLVIMVSIIFSYLSASHQNN

SEQ ID NO: 589 - protein, 272 aa, Glycine max
MYHTKKFSPASMVPHKSQGGAEQLANAGVLGGSAVKTAAPSGGSGKQRLRWTSDLHDRFVDAITQLGGPDRATPKGVLRVMGVPGLTIYHVKSHLQKYRLAKYLPESPADGKDPKDEKRMSGDSISGADSSSGMPINDALRMQMEVQKRLHEQLEVQKQLQMRIEAQGKYLQKIIEEQQKLGSTLTTSETLPLSHDKQNYPQSEASGSSDALASTVSPLKKQRIDDGSKEGFTASQVRKNDNVGQLDPNLYDDAGFGFDLETKKDEDNESGQ

SEQ ID NO: 590 - protein, 521 aa, Glycine max
MGKEQVQVLNALDVAKTQWYHFTAIIIAGMGFFTDAYDLFCISLVTKLLGRIYYHVDGAAKPGSLPPNVSAAVNGVAFVGTLSGQLFFGWLGDKMGRKKVYGMTLALMVIASIASGLSFGHDAKTVMTTLCFFRFWLGFGIGGDYPLSATIMSEYSNKKTRGAFIAAVFAMQGFGILAGGVFAIIIASVFKSKFDSPPYEVDPLGSTVPQADYVWRIILMFGAIPAAMTYYSRSKMPETARYTALVAKNMEKAAADMSKVMNMEIQAEPKKEEEAQAKSYGLFSKEFMSRHGLHLLGTTSTWFLLDIAFYSQNLFQKDIFSAIGWIPPAKTMNALEEVFFIARAQTLIALCSTVPGYWFTVAFIDRIGRFAIQLMGFFFMTIFMFALAIPYDHWTLRENRIGFVVIYSLTFFFANFGPNATTFVVPAEIFPARFRSTCHGISSASGKLGAMVGAFGFLYLAQNQDPSKADAGYPAGIGVRNSLLVLGVINILGFMFTFLVPEAKGRSLEEISGEQEEETKV

SEQ ID NO: 591 - protein, 454 aa, Glycine max
MELKQQKLLLVLILTLLFATATPDSEYVRPLPRKTLTTIPWDSISKAHSSYPQQVHISLAGDKHMRVTWITDDKHSPSYVEYGTLPGRYDSIAEGECTSYNYLLYSSGKIHHAVIGPLEDNTVYFYRCGGKGAEFELKTPPAQFPITFAVAGDLGQTGWTKSTLAHIDQCKYDVYLLPGDLSYADCMQHLWDNFGKLVEPFASTRPWMVTEGNHEEENILLLTDEFVSYNSRWKMPFEESGSTSNLYYSFEVAGVHVIMLGSYADYDVYSEQYRWLKEDLSKVDRKRTPWLLVLFHVPWYNSNKAHQGAGDDMMAAMEPLLYAASVDLVIAGHVHAYERSKRLYNGRLDPCGAVHITIGDGGNREGLAHKYINPQPKWSEFREASFGHGELKIVNSTHAFWSWHRNDDDEPVKADDIWITSLVSSRCVDQKTHELRSTLTMPENSELRGLAKVM

SEQ ID NO: 592 - protein, 478 aa, Glycine max
MATWGAHSMLLSHGEGTGTPKVCVKAGLTVRGDLRFHRTRGFKYAPSVVVLKVLATARKPTRLRLLRPYCSVRGQHDHGKGYFSPTNSQIPRQHILKFAADRMLAFLKDWSNLRITAVAGILVSVLMIIPPADAVDALKTCACLLKDCRIELAKCLSNPSCAANIACLQTCNNRPDETECQIKCGDLFENSVVDEFNECAVSRKKCVPKKSDVGEFPAPNPDVLVNSFNIAEFSGKWFITSGLNPTFDTFDCQLHEFHTESNKLVGNLSWRIRTPDAGFITRSAEQRFVQDPSYPGILYNHDNKYLHYQDDWYILSSKIENKSDDYVFVYYRGRNDAWDGYGGAVVYTRSAVLPESIVPELEKASKSVGRDFSKFIRTDNTCGPEPSLVERLEKKVEEGEETIVREVEQIEEEVEKVGKTEATLFQKLAEGFKMFQEDEENFLRGLSKEEMEILDGLKMEAGEVEKLFGRALPIRKLR

SEQ ID NO: 593 - protein, 273 aa, Glycine max
MAQTMLLMSSVSSSYSVDLKKDLFLQLQSQSLRPKFSQLSFNPLPPSTSSFSSPRTFTTLALFKSKTKAAPAKTKVTKPKQKVEDGIFGTSGGFGFTKQNELFVGRVAMLGFAASLLGEGITGKGILAQLNLETGIPIYEAEPLLLFFILFTLLGAIGGLGDRGKFVDDEPTTGGVIPSGKGFREALGLGSGPLFGFTKANELFVGRLAQLGFVSSLIGEIITGKGALAQLNIETGVPINEIEPLVLFNVLFFFIAALNPGTGKFVTGDGEDD

SEQ ID NO: 594 - protein, 669 aa, Glycine max
MATTLCYNSLNPSTTVFSRTHFSVPLNTELPLDASPFVVGYNCGVGCRTRKQRKKVMHVKCAVVEAPPGVSPSAKDGNGTTPSKKQLRILVAGGGIGGLVFALAAKRKGFEVMVFEKDLSAIRGEGQYRGPIQIQSNALAALEAIDSEVADEVMRVGCITGDRINGLVDGVSGSWYVKFDRFTPAVERGLPVTRVISRMVLQEILARAVGEDIIMNASNVVNFVDDGNKVTVELENGQKYEGDVLVRADGIWSKVRKQLFGLTEAVYSGYTCYTGIADFVPADIETVGYRVFLGHKQYFVSSDVGAGKMQWYAFHKEPPGGVDEPNGKKERLLRIFEGWCDNAVDLILATEEEAILRRDIYDRIPTLTWGKGRVTLLGDSVHAMQPNMGQGGCMAIEDSYQLAWELENAWEQSIKSGSPIDIDSSLRSYERERRLRVAIIHGMARMAALMASTYKAYLGVGLGPLEFLTKFRIPHPGRVGGRFFVDIMMPSMLSWVLGGNSDKLEGRPLSCRLTDKANDQLRRWFEDDEALERAINGEWILLPHGDGTGLSKPISLSRNEMKPFIIGSAPMQDNSGSSVTISSPQVSPTHARINYKDGAFFLIDLRSEHGTWIIDNEGKQYRVPPNYPARIRPSDVIQFGSEKVSFRVKVTSSVPRVSENESTLALQGV

SEQ ID NO: 595 - protein, 273 aa, Glycine max
MAQTMLLMSSVSSSYSVDLKKDLFLQLQSQSLRPKFSQLSFNPLPSSTSSFSSPRTFTTLALFKSKTKAAPAKTKVTKPKQKVEDGIFGTSGGFGFTKQNELFVGRVAMLGFAASLLGEGITGKGILAQLNLETGIPLYEAEPLLLFFILFTLLGAIGGLGDRGKFVDDEPTTGGVIPPGKGFREALGLGSGPLFGFTKANELFVGRLAQLGFVFSLIGEIITGKGALAQLNIETGVPINEIEPLVLFNVLFFFIAALNPGTGKFVTDEGEDD

SEQ ID NO: 596 - protein, 498 aa, Glycine max
MRWRLLFLLLPLPFTFPYSISHCTCNWPLLRCKVTFGGTPNVRIKAGLTVRGDLRFHRTAGFKYGPSVVVLKVFSTAKRPTRLRLIRPYCSLRGQHNQGKGYSSLTSTQKPRQLMLKFEADRMLVFLKDWSNIRITAVAAILVSILMIIPPADAVDALKTCACLLKDCRIELAKCLSNPSCAANIACLQTCNNRPDETECQIKCGDLFENSVVDEFNECAVSRKKCVPKKSDVGEFPAPNPDVLVNSFNIADFSGKWFITSGLNPTFDTFDCQLHEFHTESNKLVGNLSWRIRTPDAGFITRSAEQRFVQDPSYPGILYNHDNEYLHYQDDWYILSSKIENKPDDYVFVYYRGRNDAWDGYGGAVIYTRSAVLPESIVPELEKAAKSVGRDFSTFIRTDNTCGPEPSLVERLEKKVEEGEETIVREVEQLEEEVEKVGKTEATLFQKLAEGFKVFQEDEENFLRGLSKEEMEILDGLKMEAGEVEKLFGRALPIRKLR

SEQ ID NO: 597 - protein, 654 aa, Glycine max
MAVFSKTHFSIPMLKELSLDTSPCVSHGSRTTKQRNTLMPIKASVAEVPPAVRKTVDENEGGGDGASQKKKLRVLVAGGGIGGLVFALAAKRKGFEVVVFEKDMSAIRGEGQYRGPIQIQSNALAALEAIDLEVAEEVLRVGCITGDRINGLVDGISGSWYIKFDTFTPAAERGLPVTRVISRMALQEILAHAVGEDVIMNDSNVVDFVDHGDKVTVELENGQKYDGDLLVGADGIWSKVRKKLFGQTEATYSGYTCYTGIADFVPADIESVGYRVFLGHKQYFVSSDVGAGKMQWYGFHQEPAGGADIPNGKKERLLKIFKGWCDNVIDLIHATEEEAILRRDIYDRTPTFTWGKGHVTLLGDSIHAMQPNMGQGGCMAIEDSYQLALELDNAWQQSIKSGSPIDIDSSLKSYERERRLRVAIVHGMARMAAMMASTYKAYLGVGLGPLEFLTKFRIPHPGRVGGRFFIDKMMPLMLNWVLGGNSSKLEGRPVCCRLSDKANDQLHRWFEDNDALERAINGEWILLPCGDEAGPTKPICLTQDEMKPCIIGSMQQKDHPGSSIIIPLPQVSQMHARINYKDGAFFLTDLRSLHGTWITDNEGRRYRVPPNYPARVRPSDVVEFGSDKASYRVKVTRSASSESEKEGTKLYQKV

SEQ ID NO: 598 - protein, 174 aa, Glycine max; identical to SEQ ID NO: 457

SEQ ID NO: 599 - protein, 495 aa, Glycine max
MALDRSIISKTTWYSVVLWMMVVLVRVHGAAARPNRKEWDSVIKLPTEPVDADSDEVGTRWAVLVAGSNGYGNYRHQADVCHAYQLLIKGGLKEENIVVFMYDDIATNELNPRHGVIINHPEGEDLYAGVPKDYTGDNVTTENLFAVILGDKSKLKGGSGKVINSKPEDRIFIYYSDHGGPGILGMPNMPYLYAMDFIDVLKKKHASGSYKEMVIYVEACESGSVFEGIMPKDLNIYVTTASNAQENSWGTYCPGMDPSPPPEYITCLGDLYSVAWMEDSEAHNLKRESVKQQYKSVKQRTSNFNNYAMGSHVMQYGDTNITAEKLYLYQGFDPATVNFPPQNGRLETKMEVVNQRDAELFLLWQMYQRSNHQSENKTDILKQIAETVKHRKHIDGSVELIGVLLYGPGKGSSVLQSVRAPGSSLVDDWTCLKSMVRVFETHCGTLTQYGMKHMRAFANICNSGVSEASMEEACLAACEGYNAGLFHPSNRGYSA

SEQ ID NO: 600 - protein, 286 aa, Glycine max
MAKDVEVQEQGGEYSAKDYHDPPPAPLFDPEELTQWSFYRALIAEFIATLLFLYVTVLTIIGYKRQTDTTVGGTDCDGVGILGIAWAFGGMIFILVYCTAGISGGHINPAVTFGLFLGRKVSLIRALLYMVAQCAGAICGTGLAKGFQKAYYNRYGGGANSVADGYNNGTALGAEIIGTFVLVYTVFSATDPKRNARDSHVPVLAPLPIGFAVFMVHLATIPITGTGINPARSFGAAVIYNEDKIWDDQWIFWVGPIVGAAVAAFYHQYILRAAAIKALGSFRSNA

SEQ ID NO: 601 - protein, 574 aa, Glycine max
MSLKALFVGCIIWLGLVELSIGGIVRHYKFDVEYMIRKPDCLEHVLMGINGQFPGPTIRAEVGDILDIALTNKLFTEGTVIHWHGIRQVGTPWADGTASISQCAINPGETFHYKFTVDRPGTYFYHGHHGMQRAAGLYGSLIVDLPKGQNEPFHYDGEFNLLFSDLWHTSSHEQEVGLSTKPLKWIGEPQTLLINGRGQFNCSLASKFINTTLPECQFKGGEECAPQILHVEPNKTYRIRIASTTSLAALNLAISNHKLVVVEADGNYVTPFAVDDVDIYSGESYSVLLRTDQDPNKNYWLSIGVRGRKPSTSQGLTILNYKTISASIFPTSPPPITPLWNDFEHSKAFTKKIIAKMGTPQPPKLYDRRVFLLNTQNRVDGFTKWSINNVSLTLPPTPYLGSIKFKINNAFDQTPPPMNFPQDYDIFNPPVNPNATIGNGVYMFNLNEVVDVILQNSNQLSVNGSEIHPWHLHGHDFWVLGYGEGKFKLGDEKKFNLTHAPLRNTAVIFPYGWTALRFKADNPGVWAFHCHIEPHLHMGMGVIFAEGVHKVGKIPREALTCGLTGKKLVENGHY

SEQ ID NO: 602 - protein, 411 aa, Glycine max; identical to SEQ ID NO: 525

SEQ ID NO: 603 - protein, 402 aa, Glycine max
MAAATASTQLIFSKPCSPSRLCPFQLCVFDTKQVLSSGRRRHVGGSGVRCMAVGEAATTGTKKRSGYELQTLTSWLLKQEQAGVIDAELTIVLSSISMACKQIASLVQRANISNLTGVQGAVNVQGEDQKKLDVVSNEVFSNCLRSSGRTGIIASEEEDVPVAVEESYSGNYIVVFDPLDGSSNIDAAASTGSNFWIYSPNDECLADIDDDPTLDTTEQRCIVNVCQPGSNLLAAGYCMYSSSIIFVLTLGNGVFVFTLDPMYGEFVLTQENLQIPRAGKIYAFNEGNYQLWDEKLKKYIDDLKDPGQSGKPYSARYIGSLVGDFHRTLLYGGIYGYPRDKKSKNGKLRLLYECAPINFIVEQAGGKGTDGLQVLRLQGTEIHQRVPLYIGEEVEKVEKYLA

SEQ ID NO: 604 - protein, 579 aa, Glycine max; identical to SEQ ID NO: 580

SEQ ID NO: 605 - protein, 315 aa, Glycine max
MAAAIEIPTIVFPNSSAQQRMPVVGMGSAPDFTCKKDTKEAIIEAVKQGYRHFDTAAAYGSEQALGEALKEAIHLGLVSRQDLFVTSKLWVTENHPHLVLPALRKSLKTLQLEYLDLYLIHWPLSSQPGKFSFPIEVEDLLPFDVKGVWESMEECQKLGLTKAIGVSNFSVKKLQNLLSVATIRPVVDQVEMNLAWQQKKLREFCKENGIIVTAFSPLRKGASRGPNEVMENDVLKEIAEAHGKSIAQVSLRWLYEQGVTFVPKSYDKERMNQNLHIFDWALTEQDHHKISQISQSRLISGPTKPQLADLWDDQI

SEQ ID NO: 606 - protein, 413 aa, Glycine max; identical to SEQ ID NO: 582

SEQ ID NO: 607 - protein, 501 aa, Glycine max
MAISDEPETVATALNHSSLRRRPTAAGLFNSSETTTDSSGDDLAKDSGSDDSISSDAAANSQPQQKQDTDFSVLKFAYRPSVPAHRKVKESPLSSDTIFRQLQSHAGLFNLCIVVLVAVNSRLIIENLMKYGWSIKYGFWFSSKSLRDWPLFMCCLSLAIFPLAAFVVERLAQQKCISEPVVVLLHLIISTVELCYPVLVILRCDSAFVSGVTLMLLTCIVWLKLVSYAHTNYDMRALTVSNEKGETLPNTLIMEYPYTVTFRSLAYFMVAPTLCYQTSYPRTPSVRKGWVFRQLVKLIIFTGVMGFIIEQYMNPIVRNSTHPLKGNLLYAIERILKLSVPNVYVWLCMFYCFFHLWLNILAELVRFGDREFYKDWWNAKTVEEYWRMWNMPVHKWMVRHIYSPCLRRGIPKGAASLIAFLVSAVFHELCIAVPCHMFKLWAFIGIMFQVPLVLITNYLQNKYRNSMVGNMIFWFIFCILGQPMSVLLYYHDLMNRKGEVD

SEQ ID NO: 608 - protein, 501 aa, Glycine max; identical to SEQ ID NO: 607

SEQ ID NO: 609 - protein, 498 aa, Glycine max
MAISDEPETVATALNHSSLRRRPTAAGLFNSPETTTDSSGDDLAKDSGSDDSISSDAANSQPQQKQDTDFSVLKFAYRPSVPAHRKVKESPLSSDTIFRQSHAGLFNLCIVVLVAVNSRLIIENLMKYGWLIKSGFWFSSKSLRDWPLFMCCLSLVVFPFAAFIVEKLAQQKCIPEPVVVVLHIIITSASLFYPVLVILRCDSAFLSGVTLMLFACVVWLKLVSYAHTNYDMRALTKSVEKGEALPDTLNMDYPYNVSFKSLAYFLVAPTLCYQPSYPRTPYIRKGWLFRQLVKLIIFTGVMGFIIEQYINPIVQNSQHPLKGNLLYAIERVLKLSVPNLYVWLCMFYCFFHLWLNILAELLRFGDREFYQDWWNAKTVEDYWRMWNMPVHKWMIRHLYFPCLRHGIPKAVALLIAFLVSALFHELCIAVPCHIFKLWAFGGIMFQVPLVFITNYLQNKFRNSMVGNMIFWFIFSILGQPMCVLLYYHDLMNRKGKLD

SEQ ID NO: 610 - protein, 498 aa, Glycine max; identical to SEQ ID NO: 609

SEQ ID NO: 611 - protein, 328 aa, Glycine max
MAPNITTVKTTITDAQAKVATDHGRAYVTFLAGNGDYVKGVVGLAKGLRKVKSMYPLVVAVLPDVPQDHRNILTSQGCIVREIEPVYPPENQTQFAMAYYVINYSKLRIWEFVEYSKMIYLDGDIQVFDNIDHLFDLPDNYFYAVMDCFCEPTWGHTKQYQIGYCQQCPHKVQWPTHFGPKPPLYFNAGMFVYEPNLATYRDLLQTVQVTQPTSFAEQDFLNIYFKDKYRPIPNVYNLVLAMLWRHPENVELDKVKVVHYCAAGSKPWRYTGKEENMEREDIKMLVKKWWDIYEDETLDYNNPLNVDKFTAALMEVGEVKFVRAPSAA

SEQ ID NO: 612 - protein, 110 aa, Glycine max
MVVLKVCLVLLFLVGGTTSANLRLSKLGLLMKSDHQHSNDDESSKPCCDQCACTKSNPPQCRCSDMRLNSCHSACKSCICALSYPAQCFCVDITDFCYEPCKPSEDDKEN

SEQ ID NO: 613 - protein, 504 aa, Glycine max
MAISDEPESVATALNHSSLRRRPSATSTAGLFNSPETTTDSSGDDLAKDSGSDDSINSDDAAVNSQQQNEKQDTDFSVLKFAYRPSVPAHRKVKESPLSSDTIFRQSHAGLFNLCIVVLVAVNSRLIIENLMKYGWLIKSGFWFSSKSLRDWPLFMCCLSLVVFPFAAFIVEKLAQRKCIPEPVVVVLHIIITSTSLFYPVLVILRCDSAFVSGVTLMLFSCVVWLKLVSYAHTNYDMRALTKLVEKGEALLDTLNMDYPYNVSFKSLAYFLVAPTLCYQPSYPRTPYIRKGWLFRQLVKLIIFTGVMGFIIEQYINPIVQNSQHPLKGNLLYATERVLKLSVPNLYVWLCMFYCFFHLWLNILAELLRFGDREFYKDWWNAKTVEDYWRMWNMPVHKWMIRHLYYPCLRHGLPKAAALLIAFLVSALFHELCIAVPCHIFKLWAFGGIMFQVPLVLITNYLQNKFRNSMVGNMIFWFIFSILGQPMCVLLYYHDLMNRKGKLD

SEQ ID NO: 614 - protein, 300 aa, Glycine max
MQQIHSMPGGRFFSGSGSADRRLRPHHQNQQALKCPRCDSLNTKFCYYNNYNLSQPRHFCKNCRRYWTKGGVLRNVPVGGGCRKSKRSSKPNKITPSETASPPPPPHPDHNNNSNSHSSSESSSLTAAVATTTEAVSAPETLNSDSNNNNNMQESKLLIPALETNNPLEQGTGDCGGIFSEIGPFTSLITTTTSTNEPLGSGFGFGNSTLPDASSFQWHYQKVSSNNEELKLPENSFLDHTVDLSGMHSKTSHGGGFGSLDWQGGADQGLFDLPNTVDHAYWSHTHWSDHDNSSSLFHLP

SEQ ID NO: 615 - protein, 74 aa, Glycine max
MADIDRSFDNNVSAVSTEKSSQVSDVEFSEAEEILIAMVYNLVGERWSLIAGRIPGRTAEEIEKYWTSRFSTSQ

SEQ ID NO: 616 - protein, 521 aa, Glycine max
MLLELALGLFVLALFLHLRPTPSAKSKALRHLPNPPSPKPRLPFIGHLHLLKDKLLHYALIDLSKKHGPLFSLSFGSMPTVVASTPELFKLFLQTHEATSFNTRFQTSAIRRLTYDNSVAMVPFGPYWKFVRKLIMNDLLNATTVNKLRPLRTQQIRKFLRVMAQSAEAQKPLDVTEELLKWTNSTISMMMLGEAEEIRDIAREVLKIFGEYSLTDFIWPLKYLKVGKYEKRIDDILNKFDPVVERVIKKRREIVRRRKNGEVVEGEASGVFLDTLLEFAEDETMEIKITKEQIKGLVVDFFSAGTDSTAVATEWALAELINNPRVLQKAREEVYSVVGKDRLVDEVDTQNLPYIRAIVKETFRMHPPLPVVKRKCTEECEINGYVIPEGALVLFNVWQVGRDPKYWDRPSEFRPERFLETGAEGEAGPLDLRGQHFQLLPFGSGRRMCPGVNLATSGMATLLASLIQCFDLQVLGPQGQILKGDDAKVSMEERAGLTVPRAHSLVCVPLARIGVASKLLS

SEQ ID NO: 617 - protein, 386 aa, Glycine max
MQIRTCHSITTQTLPQLPCSSRKAHHRHLLPPLNAAVSAAPFKARKAHSMPPEKKEIFKSLEGWASEWVLPLLKPVEQCWQPQNFLPDPSLPHEEFSHQVKELRERTKELPDEYFVVLVGDMVTEDALPTYQTMINNLDGVKDDSGTSPSPWAVWTRAWTAEENRHGDLLRTYLYLSGRVDMAKVEKTVHYLISAGMDPGTDNNPYLGFVYTSFQERATFVAHGNTARLAKEGGDPVLARLCGTIAADEKRHENAYSRIVEKLLEVDPTGAMVAIGNMMEKKITMPAHLMYDGDDPRLFEHYSAVAQRIGVYTANDYADILEFLVERWRLEKLEGLMAEGKRAQDFVCGLAPRIRRLQERADERARKMKKHHGVKFSWIFNKELLL

SEQ ID NO: 618 - protein, 380 aa, Glycine max
MVKDTKPLAYAANNGYQQKGSSFDFDPSAPPPFKIAEIRASIPKHCWVKNPWRSLSYVLRDVLVIAALVAAAIHFDNWLLWLIYCPIQGTMFWALFVLGHDCGHGSFSDSPLLNSLVGHILHSSILVPYHGWRISHRTHHQNHGHIEKDESWVPLTEKIYKNLDSMTRLIRFTVPFPLFVYPIYLFSRSPGKEGSHFNPYSNLFPPSERKGIAISTLCWATMFSLLIYLSFITSPLLVLKLYGIPYWIFVMWLDFVTYLHHHGHHQKLPWYRGKEWSYLRGGLTTVDRDYGWIYNIHHDIGTHVIHHLFPQIPHYHLVEATQAAKPVLGDYYREPERSAPLPFHLIKYLIQSMRQDHFVSDTGDVVYYQTDSLLLHSQRD

SEQ ID NO: 619 - protein, 483 aa, Glycine max
MYSATASNTFFLLSCFLLFCLLSAPSCVSMFSGIETGDLEKRDDLFPQILRDEAVARLYELGKVSDASGYLERTFLSPASMKAIDLIRKWMEDAGLRTWVDQMGNVHGRVDGANENAEALLIGSHMDTVVDAGMFDGSLGIVSAISAVKAMHVNGKLQKLKRPVEVIAFSDEEGVRFQTTFLGSGAIAGILPGTTLEISDKREVMIKDFLKENSMDITEESLLKLKYDPKSVWGYVEVHIEQGPVLEQVGFPLGVVKGIAGQTRLKVTVRGSQGHAGTVPMSMRQDPMAAAAEQIVVLESLCKHPEEYLSYDGHCSDSTVKSLSSSLVCTVGEISTWPSASNVIPGQVTYTVDIRAIDDLGREAVIYDLSKQIYQICDKRSVSCIIEHKHDAGAVICDSDLSSQLKSAAYSALKKMEGDIQDEVPTLMSGAGHDAMAISHLTKVGMLFVRCRGGISHSPQEHVLDNDVWAAGLATLSFLENLS

SEQ ID NO: 620 - protein, 314 aa, Glycine max
MVAIEIPTLVLPNSSSQQRVPVVGMGSAPDFTCKKDTKDAIIEAIKQGYRHFDTAAAYGSEQALGEALKEAVQLGLVSRQDLFVTSKLWVTDNHPHLVVSALCKSLRTLQLEYLDLYLIHWPISSQPGKFSFPIEVEDLLPFDVKGVWEAMEECQKLGLTRAIGVSNFSVKKLEKLLSVATIRPVVNQVEMNLAWQQKKLREFCSANGIVITAFSPLRKGASKGPNEVMENDVLKEIADAHGKSIAQICLRWLYEEGVTFVPKSYDKGRMNQNLQIFNWTLTEKDHEKLSEIYQNRLINGPTKPQLNDLWDDEI

SEQ ID NO: 621 - protein, 348 aa, Glycine max; identical to SEQ ID NO: 554

SEQ ID NO: 622 - protein, 506 aa, Glycine max
MDLLLLEKTLIGLFLAAVVAIAVSTLRGRKFKLPPGPLPVPIFGNWLQVGDDLNHRNLTDLAKKFGDIFLLRMGQRNLVVVSSPELAKEVLHTQGVEFGSRTRNVVFDIFTGKGQDMVFTVYGEHWRKMRRIMTVPFFTNKVVQQYRHGWESEAAAVVEDVKKNPDAAVSGTVIRRRLQLMMYNNMYRIMFDRRFESEEDPIFQRLRALNGERSRLAQSFEYNYGDFIPILRPFLKGYLKICKEVKETRLKLFKDYFVDERKKLGSTKSTNNNNELKCAIDHILDAQRKGEINEDNVLYIVENINVAAIETTLWSIEWGIAELVNHPEIQQKLRDEIDRVLGAGHQVTEPDIQKLPYLQAVVKETLRLRMAIPLLVPHMNLHDAKLGGYDIPAESKILVNAWWLANNPAHWKKPEEFRPERFFEEESLVEANGNDFRYLPFGVGRRSCPGIILALPILGITLGRLVQNFELLPPPGQSQIDTSEKGGQFSLHILKHSTIVAKPRSF

SEQ ID NO: 623 - protein, 1187 aa, Glycine max; identical to SEQ ID NO: 503

SEQ ID NO: 624 - protein, 623 aa, Glycine max
MEGFFGNCFNMILLMLCFTNLSIAFAQSHMNGFGEQPLAKIAIHKTVLALHSSASIIAVPFVLGTKGEDTQLVTVELESPIPSVDDWVGVFSPANFNSATCPDTDGIGWVEEPYICTAPIKYKYANYSNRNYAKTGKAILKFQLINQRADFSFALFSGGLSDPRLVAISNSISFANPKAPVYPRLALGKSWGEMTVTWTSGYDINEAVPFVEWGPKGGKKTRSHAGTLTFNRNSMCGEPARTVGWRDPGFIHTSFLKELWPNFRYTYKLGHMLSNGSYVWSKKYSFKASPYPGQNSLQRVIIFGDMGKAERDGSNEYADYQPGSLNTTDQLVKDLENYDIVFHIGDMPYANGYISQWDQFTAQVQEISSTVPYMIASGNHERDWPNTGSFYDTPDSGGECGVPAETMYYFPAENRAKFWYKADYGLFRFCIADSEHDWREGSEQYKFIEHCLATVDRKHQPWLIFSAHRPLGYSSNLWYGMEGSFEEPMGRESLQKLWQKYKVDIGFYGHVHNYERVCPIYQNQCVNEEKHHYSGTVNGTIHVVVGGGGSHLSDFTPSPPIWSLYRDVDYGFGKLTAFNHSYLLFEYKKSSDGEVYDSFTISRDYRDVLACVHDGCEKTTLAT

SEQ ID NO: 625 - protein, 413 aa, Glycine max; identical to SEQ ID NO: 588

SEQ ID NO: 626 - protein, 392 aa, Glycine max
MASLPSFTPFVFLLLVIGCNARPLYPLPSKGDDGNRKPLQTFRPYNIAHRGSNGELPEETHPAYLRAIEEGADFIETDILSSKDGVLVCFHDVTLDNTTDIANRTEFANRKRTYEVQGENMTGFFTVDFTLKELKSLRVKQRCSFRDQQFNGKFQIITFEEFITIALDAPRVVGIYPEIKNPVFINQHVKWSHGKRFEDKFVETLQKYGYKGSYLSKDWLRQPVFIQSFAPTSLVYISNKTDLPKVFLIDDVTVPTQDTNQSYWEITSDEYLEYIKQYVVGIGPWKDTVVPVVKNYMTNPTNLVARAHAHNLQVHPYTYRNEFPFLHFNFSQDPYMEYDFWINKIGVDGLFTDFTGSLHRYQEWTSNRKDDDDDKTESNLLHKIALLVSSYE

SEQ ID NO: 627 - protein, 424 aa, Glycine max
MPLHSDVFVAPSGYNAPQQVHITQGDQVGRAMIVSWVTVDEPGKSLVHYWSDASQHKRVAKGNHVTYRYFNYSSGFIHHCTLRDLEFNTKYYYEVGIGHTTRQFWFVTPPEVHPDAPYTFGLIGDLGQTFDSNKTLVHYESNPHKGQAVLYVGDLSYADNHPNHDNVRWDTWGRFVERSTAYQPWIWTTGNHELDYAPEIDETEPFKPFRHRYYVPYKASGSTEPFWYSVKIASAHIIVLASYSAYGKYTPQYEWLEAELPKVDRTKTPWLIVLVHSPWYNSYNYHYMEGETMKVMFEPWFVKYKVDVVFAGHVHAYERSERISNTGYNITNGRCRPLKDQSAPVYINIGDGGNIEGLASNMTNPQPEYSAYREASFGHAILEIKNRTHAHYSWHRNEDEYAVTADSMWFFNRYWHPVDDSTTK

SEQ ID NO: 628 - protein, 403 aa, Glycine max
MASSSLSLSLSLTLCLVSTLCYAHTSSLTLPVTKDHSTHQYLTILSYGTPVESAKFVLDLGGSLLWADCASRTTPSSTLAPIFHRSIRCLTAKGPEIETHRWLSSLANPIDQDQPCQITAENSITGKRVTEGELVEDLVIHRSHELLFTCSPTFLLNGLATDAKGIIGLDKSRISFSSQVFHSLKIQRKITLCLSHTSGVIQFGKMTHKSQTESEIFRYLTFTPLVANQDPTQTQSSINVNSVKINGKKVAFDTPLGGGAQLSTVVPYTTLQTSIYDNFESAYLKAASSMDMKRVDPVSPFGLCFESNGVGSSQVGPNVPIIDLVLQSEMVKWSIYGRNSMVQVSDDVMCLGFVDGGENPRNSIVIGGFQLEDVLVQIDFDTSMVGFSPSLLTKQASCSDFQP

SEQ ID NO: 629 - protein, 170 aa, Glycine max; identical to SEQ ID NO: 511

SEQ ID NO: 630 - protein, 435 aa, Glycine max
MDNSNLQRLFTLFLFSLIAPSLAQQSFRPRALVVPVKKDASTLQYITQIKQRTPLVPENLVLDIGGQFLWVDCDNNYVSSTYRPARCGSAQCSLARSDSCGNCFSAPKPGCNNNTCGVTPDNTVTGTATSGELAQDVVSLQSTNGFNPIQNATVSRFLFSCAPTFLLQGLATGVSGMAGLGRTRIALPSQLASAFSFRRKFAVCLSSSNGVAFFGDGPYVLLPNVDASQLLTFTPLLINPVSTASAFSQGEPSAEYFIGVKSIKIDEKTVPLNTTLLSINSKGVGGTKISSVNPYTVLEDSIFKAVTEAFVKASSARNITRVASVAPFEVCFSRENVLATRLGAAVPTIELVLQNQKTVWRIFGANSMVSVSDDKVLCLGFVNGGENPRTSIVIGGYQLEDNLLQFDLATSRLGFSSLLYGSRTTCANFNFTSAA

SEQ ID NO: 631 - protein, 662 aa, Glycine max
MIPDLPLPFLFSLFIIFFHLAESKPSLTATPTTLPASGATVNLRWSGIPSPSDLDFLAIYSPPTSPHDNFIGYLFLSQSATWRTGSGNLSLPLVDLRSNYSFRIFSWTRAEINPKRQDHDHNPLPVTRHLLAFSEEVSFAPHRGPQQIHLAFVGAHGKEEDMRVMYITRDPRETYVRYGEREDKLDGIAVARVERYEREHMCDAPANTSVGWRDPGFIHDAVLIGLKKGQRYYYKVGNDNGGWSATQSFVSRNSDSDETIAFLFGDMGTAVPYNTFLRTQDESISTMKWILRDVEALGDTPAFVSHIGDISYARGYSWLWDHFFAQIEPVASQVAYHVCIGNHEYDWPLQPWKPDWASYGKDGGGECGVPYSLRFNMPGNSSELTGNAAAPPTRNLYYSFDMGAVHFVYISTETNFVPGSKQYDFLKHDLESVNRSKTPFVVVQGHRPMYTTSHENRDAALRGKMLEHLEPLLVNNNVTLALWGHVHRYERFCPLNNFTCGVNAGHNAGDKKGYTVHIVIGMAGQDWQPVWEPRPDHPDDPIFPQPKWSLYRGGEFGYTRLVATKQKLVLSYVGNHDGEVHDQLEILASGEVVSGDGGCSIADANSKAGNVIVESTLSWYVKGGSVLLLGAFMGYVFGYVTSARKKSEVPESNWTPVKTEET

SEQ ID NO: 632 - protein, 315 aa, Glycine max
MAAAIEIPKIVFPNSSAQQRVPVIGMGSAPDFTCKKDTKEAIIEAVKQGYRHFDTAAAYGSEQALGEALKEAIHLGLVTRQDLFVTSKLWVTENHPHLVVPALRKSLKTLQLEYLDLYLIHWPLSSQPGKFSFPIEVDDLLPFDVKGVWESMEECQKLGLTKAIGVSNFSVKKLQNLLSVATIRPVVDQVEMNLAWQQKKLREFCKENGIILTAFSPLRKGASKGPNEVMENDVLKEIAEAHGKSIAQVSLRWLYEQGVTFVPKSYDKERMNQNLQIFDWALTEEDHHKIDEIYQSRLISGPTKPQVTDLWDDEI

SEQ ID NO: 633 - protein, 613 aa, Glycine max
MGESKFVSLAFLLVCLVVQRVWSHGYHPLSKVAVHKATVSLLDLAYIKASPAVLGLQEQTAEWVTLEYSSPIPSIGDWIGVFSPANFSASTCPKENRRVYPPLLCSAPIKYQYANYSSPLYKETGKGFLKLLLINQRSDFSFALFSGGLSNPKLVAVSDKIAFANPNAPLYPRLALGKSWNEMTVTWTSGYGINDAEPFVQWGPKEGDRMHSPAETLTFTRDSMCGAPARTVGWRDPGYIHTSHLKELWPNKIYEYRIGHKLNNVTYIWSGNYQFTAPPCPGQKSLQRVVIFGDMGKGEVDGSNEYNNFQHGSINTTQQLIQDLEDIDIVFHIGDICYANGYLPQWDQFTAQVEPIASAVPYMIASGNHERDWPGTGSFYENMDSGGECGVLAQTMFYTPASNRAKLWYSIDYGMFRFCIADTEHDWREGTEQYKFIEHCLASVDRQKQPWIIFLAHRVLGYSSCICYAEEGSFAEPMGRESFQKLWQKYKVDIAIYGHVHNYERTCPIYQNICTNEEKHHYKGRTLNGTIHVVAGGGGASLSAFTSLKTKWSIFKDYDYGFVKLTAFDHSNLLFEYKKSRDGKVYDSFKISRDYRDILACTMDSCPSITMAS

SEQ ID NO: 634 - protein, 387 aa, Glycine max
MGLAKETIMGGGGRVAKVEIQQKKPLSRVPNTKPPFTVGQLKKAIPPHCFQRSLLTSLSYVVYDLSLAFIFYIATTYFHLLPHPFSLIAWPIYWVLQGCILTGVWVIAHECGHHAFSKYPWVDDVMGLTVHSALLVPYFSWKISHRRHHSNTGSLDRDEVFVPKPKSKVAWYTKYLNNPLGRAASLLITLTIGWPLYLAFNVSGRPYDGFASHYHPYAPIYSNRERLLIYVSDVALFSVTYLLYRVATMKGLVWLLCVYGVPLLIVNGFLVTITYLQHTHYALPHYDSSEWDWLRGALATMDRDYGILNKVFHHITDTHVAHHLFSTMPHYHATEATNAMKPILGEYYRFDDTPFYKALWREARECLYVEPDEGTSEKGVYWYRNKY

SEQ ID NO: 635 - protein, 403 aa, Glycine max
MASSSLFLSLSLTLCLVSSLCYAHKSSLTLPVTKDDSTHQYLTTLSYGTPVESAKFVLDLGGSILWADCASRTTPSSTLAPIFHRSIRCLTAKGPEIETHRWLSSLANPIDQDQPCQIPAENSISGKRVTEGELVEDLVINRSHELLFTCSPTLLLNGLATGAKGMVGLDRSRTSFSSQVFHSLGTQRKITLCLSSSSGIVQFGNVAHESQPGSEIFRSLTFTPLVANQDQTQTHPSINVNSVKINGKKVSFDTPLGGGAQLSTVVPYTTLQTSIYANFESAYLKAASSMSMKRVDPVSPFGLCFESNGVGSSQVGPNVPVIDLVLQSEMVKWSIHGRNSMVQVNDDVMCLGFVDGGENPRNPIVIGGYQLEDVLVQIDFDTSMVGFSPSLLTKHATCSHFKP

SEQ ID NO: 636 - protein, 438 aa, Glycine max
MAASVKLLFLSFLSLFISFSIAQTSFRPKALVLPVTKDVSASVPQYVTQIKQRTPLVAVKLTVDLGGGYLWVNCEKGYVSSTSRPARCGSAQCSLFGLYGCSTEDKICGRSPSNTVTGVSTYGDIHADVVAVNSTDGNNPTKVVSVPKFLFICGSNVVQKGLASGVTGMAGLGRTKVSLPSQFASAFSFHRKFAICLSSSTMTNGVMFFGDGPYNFGYLNSDLSKVLTFTPLISNPVSTAPSYFQGEPSVEYFIGVKSIKVSDKNVALNTTLLSIDRNGIGGTKISTVNPYTVMETTIYKAVSEVFVKEVGAPTVAPVAPFGTCFATKDIGSTRMGPAVPGIDLVLQNDVVWTIIGANSMVYVNDVICLGFVDAGSSPSVAQVGFVAGGSHPRTSITIGAHQLENNLLQFDLATSRLGFRSIFFDHSNCANFNFTSSA

SEQ ID NO: 637 - protein, 346 aa, Glycine max; identical to SEQ ID NO: 514

SEQ ID NO: 638 - protein, 601 aa, Glycine max
MNLVLVVAWLVQLNIVYGFAHIHGFGEQPLSRIAIHKAVVSLHSSASITATPSLLGTKGEDTQWVTVDIDYPDPSADDWVGVFSPAKFNASTCPPVNDPKEVIPYICSAPIKTGKASLKFQLINQRADFSFALFSGGLLNPKLVAVSNFISFVNPKVPLYPRLAQGKSWDEMTVTWTSGYDINEATPFVEWGPKGKTQVQSPAGTLTFGRNSMCGSPARTVGWRDPGFIHTSFLKNLWPNLVYTYQLGHLLSNGSYIWSKKYSFKSSPYPGQDSLQRVIIFGDMGKAERDGSNEYNAYQPGSLNTTDQLIKDLENIDIVFHIGDITYANGYLSQWDQFTAQVEPIASTVPYMIASGNHERDWPNTGSFYSTTDSGGECGVLAQNMFFVPAENRANFWYAMDYGMFRFCIADTEHDWREGSEQYKFIEHCLATVDRQKQPWLIFAAHRVLGYSSDFWYGVEGSFEEPMGRESLQRLWQKYKVDIAFYGHVHNYERTCPIYQNQCVNDERSHYSGVVNGTIHVVAGGAGSHLSNFSQVTPKWSLYRDYDFGFVKLTAFSHSSLLFEYKKSSDGKVYDSFTISRDYKDVLACVHDSCEATTSAT

SEQ ID NO: 639 - protein, 176 aa, Glycine max; identical to SEQ ID NO: 515

SEQ ID NO: 640 - protein, 193 aa, Glycine max; identical to SEQ ID NO: 571

SEQ ID NO: 641 - protein, 219 aa, Glycine max
MTDEVVLLDFWPSPFGMRVRIALAEKGIEYEYKEEDLRNKSPLLLQMNPVHKKIPVLIHNGKPISESLIAVQYIEEVWNDRNPLLPSDPYQRAQARFWADYVDIKIHDLGKKIWTSKGEEKEAAKKEFIEALKLLEEQLGDKTYFGGDNIGFVDIALVPFYTWFKVYETFGSLNIENECPRFVAWAKRCLQKESVAKSLPDQHKVYEFVVEIRKKLVIE

SEQ ID NO: 642 - protein, 368 aa, Glycine max; identical to SEQ ID NO: 458

SEQ ID NO: 643 - protein, 667 aa, Glycine max; identical to SEQ ID NO: 526

SEQ ID NO: 644 - protein, 495 aa, Glycine max; identical to SEQ ID NO: 599

SEQ ID NO: 645 - protein, 299 aa, Glycine max
MASELELPPGFRFHPTDEELVLHYLCRKCASQPIAVPIIAEIDLYKYDPWDLPGLATYGEKEWYFFSPRDRKYPNGSRPNRAAGTGYWKATGADKPIGQPKPVGIKKALVFYAGKAPKGDKSNWIMHEYRLADVDRSVRKKNTLRLDDWVLCRIYNKKGTIEKLQPSSDVAHSRNIESSEIEDRKPEILKSGGGCLPPPAPVPAPPQATAKTDYMYFDPSDSIPKLHTDSSCSEQVVSPGFASEVQSEPKWNEWEKSLEFPFNYVDATLNNSFMAQFQGNNQMLSPLQDMFMYWPNKSF

SEQ ID NO: 646 - protein, 261 aa, Glycine max
MCTLTTVPVLPSKLNKPSLSPHHNSLFPYCGRRVGKKNKAMVPVARLFGPAIFEASKLKVLFLGVDENKHPGNLPRTYTLTHSDITAKLTLAISQTINNSQLQGWYNRFQRDEVVAQWKKVKGRMSLHVHCHISGGHFLLDILARLRYFIFCKELPVVLKAVVHGDENLFNSYPELQDALVWVYFHSNIPEFNKVECWGPLKEASAPTGGVQEEGLAIPQPCQEECQCCFPPLTLSPIQWSKQVPSRHYEPCDGIGTQQNL

SEQ ID NO: 647 - skipped

SEQ ID NO: 648 - protein, 352 aa, Glycine max
MGEVDPAFIQEPQHRPNLSTIQAEGIPIIDLSPITNHTVSDPSAIESLVKEIGRACQEWGFFQVTNHGVPLTLRQNIEKASKLFFAQTLEEKRKVSRNESSPMGYYDTEHTKNVRDWKEVFDFLAKDLTFIPLTSDEHDDRVNQWTNQSPQYPPLFRVVTQEYIQEMEKLSFKLLELIALSLGLEAKRFEEFFIKDQTSFIRLNHYPPCPYPDLALGVGRHKDPGALTILAQDEVGGLEVRRKRDQEWIRVKPTPNAYIINIGDTVQVWSNDAYESVDHRVVVNSEKERLSIPFFFFPAHDTKVKPLEELINEQNPSKYRPYNWGKFLVHRGNSNFKKQNEENIQIHHYKIA

SEQ ID NO: 649 - protein, 634 aa, Glycine max
MGSNRTIVWFRRDLRIEDNPALTAAAKEGSVLPVYVWCPKEEGQFYPGRVSRWWLKQSLAHLDQSLKSLGSRLVLIKTHSTAVALVECVKAIQATKVVFNHLYDPVSLVRDHNIKEKLVEQGISVQSYNGDLLYEPWEVNSESGRAFTTFNAFWKKCLHMQMDIVSVVPPWQLIPAEGKIEECSLEELGLENESEKPSNALLGRAWSPGWRNADKALREFVELHLLHYSKKRLKVGGESTSLLSPYLHFGELSARKVFQVTCMKQILWTNEGNSAGEESANLFLRAIGLREYSRYLCFNFPFTHERALLGHLKFFPWNPDPDIFKTWRQGRTGFPLVDAGMRELWATGWIHNRIRVIVSSFAVKMLLLPWKWGMKYFWDTLLDADLESDILGWQYISGGLPDGHELERLDNPEIQGAKFDPEGEYVRQWLPELARMPTEWIHHPWDAPLTVLRAAGVELGQNYPKPIIDIDLARERLTEAIFKMWESEAAAKAAGSEPRDEVVVDNSHTVENLDTQKVVVLGKAPCATISANDQKVPALQDSKNEPPTRKRPKHMIEEGQNQDHSQNHNKDTGLSSIDQDICSTADSSSCKKQCASTSSYSFSVPQQCSSSSNLKWPWQEKIDMEQSSSKDGAM

SEQ ID NO: 650 - protein, 338 aa, Glycine max
MASLLPQPQETKPTATTATETTPSETSITASANKSSSSNNNNSSSNSRKCEGKGGPDNNKFRYRGVRQRSWGKWVAEIREPRKRTRKWLGTFATAEDAARAYDRAAIILYGSRAQLNLQPSGSSSQSSSSRSSSSSTQTLRPLLPRPSGFTFNFPFNSAPATTVPYPYNNSHNYTYTPPVLYPIDNSKNHNINTVQVHHPHHYRCPEEVVQVPHSESDLGGLGGNNNIVVDGSIRSTSYQRHGFLDNINNNNNHVHVQVQHGVFSNQQQQHQNSVVEGVNSSVVGSVSSSMDASSVDPDLALVGTMGLGSSSPFWSMANEDDYTGSLWDYNDPFFFDL

SEQ ID NO: 651 - protein, 421 aa, Glycine max; identical to SEQ ID NO: 562

SEQ ID NO: 652 - protein, 634 aa, Glycine max
MGSNRTIVWFRRDLRIEDNPALAAAAKEGSVLPVYIWCPKEEGQFYPGRVSRWWLKQSLAHLDQSLKSLGSRLVLIKTHSTVTALVECVKAIQATKVVFNHLYDPVSLVRDHNIKEKLVEQGISVQSYNGDLLYEPWEVYSESGRAFTTFNAFWKKCLHMQMDIVSVVPPWQLIPAEGKVEECPLEELGLENESEKPSNALLGRAWSPGWRNADKALTEFVEQHLLDYSKKRLKVGGDSTSLLSPYLHFGELSVRKVFQVTRMKQILWTNEGNSAGEESVNLFLRAIGLREYSRYLCFNFPFTHEKALLGHLKFFPWNPDADIFKNWRQGRTGFPLVDAGMRELWATGWIHNRIRVIVSSFAVKMLLLPWKWGMKYFWDTLLDADLESDILGWQYISGGLPDGHEPERLDNPEIQGVKFDPEGEYVRQWLPELARMPTEWIHHPWDAPLTVLRAAGVELGQNYPKPIIDIDLARERLIEAIFKMWESEAAAKAAGSEPRDEVVVDNSNSLENLDTRKVVVLGKAPCSTISANDQKVPALQDSKNEPPTRKRPKHMVEEGQNQDNSQNHNKDTGMSSIDQDICSTADSSSCKKQCASTSSYSFSVPQQCSSSSNLKWPWQDQTDMEQSSSKDGAM

SEQ ID NO: 653 - protein, 353 aa, Glycine max
MEKVDQAFIQYPQHRPNLTIIQPEHIPIIDLSPITNHTVSHPSPIEGLVKEIGNACKEWGFFQVINHGVSLTLRQNIEKASKLFFAQSLEEKRKVSRDESSPMGYYDTEHTKNIRDWKEVFDFLAKDPTFVPLTSDEHDNRLTQWTNPSPQYPPHFRDIIKEYVEEMEKLSFKLMELIALSLGLEAKRFEEFFIKDQTSFLRLNYYPPCPYPHLALGVGRHKDSGPLTILAQDEVGGLEVRPKADQDWIRVKPIPNAYIINLGDMIQVWSNDAYESVEHRVVVNSEKARFSIPFFLFPAHDTVVKPLEELINEQNPSKFRPYKWGKFLVHRLDSNFKKQNAENVQTYHYKIRE

SEQ ID NO: 654 - protein, 600 aa, Glycine max
MGMNKTIVWFRRDLRIEDNPALAAAAAAKDGSVFPVYIWCPKEEGQFYPGRVSRWWLKQSLAHLDKSLKSLGAELMLIKTDSTLEALLECVNAIQATKVVFNHLYDPVSLVRDHNIKEKLVELGISVKSYNGDLLFEPWSIYDETGHAFTTFDPFWNRCLHMQMKAFSLIPPQLILAEGKVGKCSIEQLGLEDESEKSSNALLGRAWYPGWNKTDKALTEFVEQHLLHYSKNRLKVGGDSTSLLSPYIHFGELSVRKVFQLARTKQILWANEGNSAGEESATVFLRAIGLREYSRYLCFNFPSTIEKPLLGNLAFFPWKTDPANFKAWRQGRTGYPLVDAGMRELWATGWIHNKIRVIVSSFAVKMLLIPWRWGMKYFWDTLLDADLESDILGWQYISGCLPDGHKLERLDDPAIHGAKFDPEGEYVRQWLPELARMPAEWIHHPWNAPLTVLRASGVELGQNYPKPIIDIDQAREQLTEAIFKMWENEAASKGSGSEERHEVVDESESLAIPKVFLKDKVSHITSSSNDQKVPTLDNPQIDPPNRKRPKCSAEVEQKQNNSRNLSKDTGVSSIDQDVSSTAESSCKRESSSSYSFSVPQ

SEQ ID NO: 655 - skipped

SEQ ID NO: 656 - protein, 476 aa, Glycine max
MLDLNLTAESTQNDELLVLLDKFPEASSGTSNSSIVNAEGSSNEDSCSTRAGDVFTFNFGILKVEAANDVVAAATKELFPVSSENWQGQSSTSLFQARKSLMDLSLDQQHGEVKVVQVQPQPKVKKSRRGPRSRSSQYRGVTFYRRTGRWESHIWDCGKQVYLGGFDTAHAAARAYDRAAIKFRGLDADINFNLVDYEEDLKQMKNLSKEEFVHILRRHSSGFSRGSSKYRGVTLHKCGRWEARMGQFLGKKYIYLGLFDSEVEAARAYDKAAIKCNGREAVTNFEPSTYESEMKPEAINEGGSHDLDLSLGIATPGHGPKENRGHLQFQSIPYNMHPGRSSMMETNINSVIGDPSLKRLVVTEERPSVWNAAYSTFFPNLERAERMGTDPSKGVPNPNWAWQTHGQVTDTPVPPFSTAASSGFSISATFPSTAIFPTKSINSVPHSLCFTSPSTPGSNAPQFYNYYEVKSPQPPS

SEQ ID NO: 657-676 - skipped (20 entries)

SEQ ID NO: 677 - DNA, 3079 bp, synthetic construct
  source 1..3079: mol_type = other DNA
tcgcgcgtttcggtgatgacggtgaaaacctctgacacatgcagctcccggagacggtcacagcttgtctgtaagcggatgccgggagcagacaagcccgtcagggcgcgtcagcgggtgttggcgggtgtcggggctggcttaactatgcggcatcagagcagattgtactgagagtgcaccatatgcggtgtgaaataccgcacagatgcgtaaggagaaaataccgcatcaggcgccattcgccattcaggctgcgcaactgttgggaagggcgatcggtgcgggcctcttcgctattacgccagctggcgaaagggggatgtgctgcaaggcgattaagttgggtaacgccagggttttcccagtcacgacgttgtaaaacgacggccagtggaattctaaagatctaaaataaatggtaaaatgtcaaatcaaaactaggctgcagtatgcagagcagagtcatgatgatactacttactacaccgattcttgtgtgcagaaaaatatgttaaaataattgaatctttctctagccaaatttgacaacaatgtacaccgttcatattgagagacgatgcttcttgtttgctttcggtggaagctgcatatactcaacattactccttcagcgagttttccaactgagtcccacattgcccagacctaacacggtattcttgtttataatgaaatgtgccaccacatggattgaagcaagagacgttctagggttttagagctagaaatagcaagttaaaataaggctagtccgttatcaacttgaaaaagtggcaccgagtcggtgctttttttggatccggcgcgccgcatgcaagcttggcgtaatcatggtcatagctgtttcctgtgtgaaattgttatccgctcacaattccacacaacatacgagccggaagcataaagtgtaaagcctggggtgcctaatgagtgagctaactcacattaattgcgttgcgctcactgcccgctttccagtcgggaaacctgtcgtgccagctgcattaatgaatcggccaacgcgcggggagaggcggtttgcgtattgggcgctcttccgcttcctcgctcactgactcgctgcgctcggtcgttcggctgcggcgagcggtatcagctcactcaaaggcggtaatacggttatccacagaatcaggggataacgcaggaaagaacatgtgagcaaaaggccagcaaaaggccaggaaccgtaaaaaggccgcgttgctggcgtttttccataggctccgcccccctgacgagcatcacaaaaatcgacgctcaagtcagaggtggcgaaacccgacaggactataaagataccaggcgtttccccctggaagctccctcgtgcgctctcctgttccgaccctgccgcttaccggatacctgtccgcctttctcccttcgggaagcgtggcgctttctcatagctcacgctgtaggtatctcagttcggtgtaggtcgttcgctccaagctgggctgtgtgcacgaaccccccgttcagcccgaccgctgcgccttatccggtaactatcgtcttgagtccaacccggtaagacacgacttatcgccactggcagcagccactggtaacaggattagcagagcgaggtatgtaggcggtgctacagagttcttgaagtggtggcctaactacggctacactagaagaacagtatttggtatctgcgctctgctgaagccagttaccttcggaaaaagagttggtagctcttgatccggcaaacaaaccaccgctggtagcggtggtttttttgtttgcaagcagcagattacgcgcagaaaaaaaggatctcaagaagatcctttgatcttttctacggggtctgacgctcagtggaacgaaaactcacgttaagggattttggtcatgagattatcaaaaaggatcttcacctagatccttttaaattaaaaatgaagttttaaatcaatctaaagtatatatgagtaaacttggtctgacagttaccaatgcttaatcagtgaggcacctatctcagcgatctgtctatttcgttcatccatagttgcctgactccccgtcgtgtagataactacgatacgggagggcttaccatctggccccagtgctgcaatgataccgcgagacccacgctcaccggctccagatttatcagcaataaaccagccagccggaagggccgagcgcagaagtggtcctgcaactttatccgcctccatccagtctattaattgttgccgggaagctagagtaagtagttcgccagttaatagtttgcgcaacgttgttgccattgctacaggcatcgtggtgtcacgctcgtcgtttggtatggcttcattcagctccggttcccaacgatcaaggcgagttacatgatcccccatgttgtgcaaaaaagcggttagctccttcggtcctccgatcgttgtcagaagtaagttggccgcagtgttatcactcatggttatggcagcactgcataattctcttactgtcatgccatccgtaagatgcttttctgtgactggtgagtactcaaccaagtcattctgagaatagtgtatgcggcgaccgagttgctcttgcccggcgtcaatacgggataataccgcgccacatagcagaactttaaaagtgctcatcattggaaaacgttcttcggggcgaaaactctcaaggatcttaccgctgttgagatccagttcgatgtaacccactcgtgcacccaactgatcttcagcatcttttactttcaccagcgtttctgggtgagcaaaaacaggaaggcaaaatgccgcaaaaaagggaataagggcgacacggaaatgttgaatactcatactcttcctttttcaatattattgaagcatttatcagggttattgtctcatgagcggatacatatttgaatgtatttagaaaaataaacaaataggggttccgcgcacatttccccgaaaagtgccacctgacgtctaagaaaccattattatcatgacattaacctataaaaataggcgtatcacgaggccctttcgtc

SEQ ID NO: 678 - DNA, 20 bp, synthetic construct
  source 1..20: mol_type = other DNA
gaagcaagagacgttctagg

SEQ ID NO: 679 - DNA, 76 bp, synthetic construct
  source 1..76: mol_type = other DNA
gttttagagctagaaatagcaagttaaaataaggctagtccgttatcaacttgaaaaagtggcaccgagtcggtgc

SEQ ID NO: 680 - DNA, 96 bp, synthetic construct
  source 1..96: mol_type = other DNA
gaagcaagagacgttctagggttttagagctagaaatagcaagttaaaataaggctagtccgttatcaacttgaaaaagtggcaccgagtcggtgc

SEQ ID NO: 681 - DNA, 8569 bp, synthetic construct
  source 1..8569: mol_type = other DNA
tcgcgcgtttcggtgatgacggtgaaaacctctgacacatgcagctcccggagacggtcacagcttgtctgtaagcggatgccgggagcagacaagcccgtcagggcgcgtcagcgggtgttggcgggtgtcggggctggcttaactatgcggcatcagagcagattgtactgagagtgcaccatatgcggtgtgaaataccgcacagatgcgtaaggagaaaataccgcatcaggcgccattcgccattcaggctgcgcaactgttgggaagggcgatcggtgcgggcctcttcgctattacgccagctggcgaaagggggatgtgctgcaaggcgattaagttgggtaacgccagggttttcccagtcacgacgttgtaaaacgacggccagtgaattctaaagatctggcgcgccggcccgggctggttattgtttttgtcaatgagctatcttttagtcttatgttattggtgaatctgtccttaagttgcatcatttaacacatctcctcattagagaaaaaaattcttccctaaacgattggtagtaaaaacatctaataagaaataagaaagaaaaattaggaaaaaggaaagttcattaaaaaaaatattttgaattattttttaaaaaatatctaaatattttttaaatgaataattttatataaactgtaactaaatgtatacaagtaatgtatgttaaaaaaatacttgaaaaatctactgaaaatatatcttacaaggtgaaattaaataagaaagaatttagtggaataattatgattttatttaaaaaataattattaaagatttttttgctccataataagaaaacttttcaattattcttttctggtccataataaaaaaaatctagcatgacagcttttccatagatttttaataatgtaaaagcagccgacttcaggcaatggatagtggggcccgtatcaacttcggacgctccacttgcaacggggtgggcccaatataacaacgacgtcgtaacagataaagcgaagattgaaggtgcatgtgactccgtcaagattacgaaaccgccaactaccacgcaaattgcaattctcaatttcctagaaggactctccgaaaatgcatccaataccaaatattacccgtgtcataggcaccaagtgacaccatacatgaacacgcgtcacaatatgactggagaagggttccacaccttatgctataaaacgccccacacccctcctccttccttcgcagttcaattccaatatattccattctctctgtgtatttccctacctctcccttcaaggttagtcgatttcttctgtttttcttcttcgttctttccatgaattgtgtatgttctttgatcaatacgatgttgatttgattgtgttttgtttggtttcatcgatcttcaattttcataatcagattcagcttttattatctttacaacaacgtccttaatttgatgattctttaatcgtagatttgctctaattagagctttttcatgtcagatccctttacaacaagccttaattgttgattcattaatcgtagattagggcttttttcattgattacttcagatccgttaaacgtaaccatagatcagggctttttcatgaattacttcagatccgttaaacaacagccttattttttatacttctgtggtttttcaagaaattgttcagatccgttgacaaaaagccttattcgttgattctatatcgtttttcgagagatattgctcagatgtgttagcaactgccttgtttgttgattctattgccgtggattagggttttttttcacgagattgcttcagatccgtacttaagattacgtaatggattttgattctgatttatctgtgattgttgactcgacaggatcggtaccccatggataagaagtactctatcggactcgatatcggaactaactctgtgggatgggctgtgatcaccgatgagtacaaggtgccatctaagaagttcaaggttctcggaaacaccgataggcactctatcaagaaaaaccttatcggtgctctcctcttcgattctggtgaaactgctgaggctaccagactcaagagaaccgctagaagaaggtacaccagaagaaagaacaggatctgctacctccaagagatcttctctaacgagatggctaaagtggatgattcattcttccacaggctcgaagagtcattcctcgtggaagaagataagaagcacgagaggcaccctatcttcggaaacatcgttgatgaggtggcataccacgagaagtaccctactatctaccacctcagaaagaagctcgttgattctactgataaggctgatctcaggctcatctacctcgctctcgctcacatgatcaagttcagaggacacttcctcatcgagggtgatctcaaccctgataactctgatgtggataagttgttcatccagctcgtgcagacctacaaccagcttttcgaagagaaccctatcaacgcttcaggtgtggatgctaaggctatcctctctgctaggctctctaagtcaagaaggcttgagaacctcattgctcagctccctggtgagaagaagaacggacttttcggaaacttgatcgctctctctctcggactcacccctaacttcaagtctaacttcgatctcgctgaggatgcaaagctccagctctcaaaggatacctacgatgatgatctcgataacctcctcgctcagatcggagatcagtacgctgatttgttcctcgctgctaagaacctctctgatgctatcctcctcagtgatatcctcagagtgaacaccgagatcaccaaggctccactctcagcttctatgatcaagagatacgatgagcaccaccaggatctcacacttctcaaggctcttgttagacagcagctcccagagaagtacaaagagattttcttcgatcagtctaagaacggatacgctggttacatcgatggtggtgcatctcaagaagagttctacaagttcatcaagcctatcctcgagaagatggatggaaccgaggaactcctcgtgaagctcaatagagaggatcttctcagaaagcagaggaccttcgataacggatctatccctcatcagatccacctcggagagttgcacgctatccttagaaggcaagaggatttctacccattcctcaaggataacagggaaaagattgagaagattctcaccttcagaatcccttactacgtgggacctctcgctagaggaaactcaagattcgcttggatgaccagaaagtctgaggaaaccatcaccccttggaacttcgaagaggtggtggataagggtgctagtgctcagtctttcatcgagaggatgaccaacttcgataagaaccttccaaacgagaaggtgctccctaagcactctttgctctacgagtacttcaccgtgtacaacgagttgaccaaggttaagtacgtgaccgagggaatgaggaagcctgcttttttgtcaggtgagcaaaagaaggctatcgttgatctcttgttcaagaccaacagaaaggtgaccgtgaagcagctcaaagaggattacttcaagaaaatcgagtgcttcgattcagttgagatttctggtgttgaggataggttcaacgcatctctcggaacctaccacgatctcctcaagatcattaaggataaggatttcttggataacgaggaaaacgaggatatcttggaggatatcgttcttaccctcaccctctttgaagatagagagatgattgaagaaaggctcaagacctacgctcatctcttcgatgataaggtgatgaagcagttgaagagaagaagatacactggttggggaaggctctcaagaaagctcattaacggaatcagggataagcagtctggaaagacaatccttgatttcctcaagtctgatggattcgctaacagaaacttcatgcagctcatccacgatgattctctcacctttaaagaggatatccagaaggctcaggtttcaggacagggtgatagtctccatgagcatatcgctaacctcgctggatctcctgcaatcaagaagggaatcctccagactgtgaaggttgtggatgagttggtgaaggtgatgggaaggcataagcctgagaacatcgtgatcgaaatggctagagagaaccagaccactcagaagggacagaagaactctagggaaaggatgaagaggatcgaggaaggtatcaaagagcttggatctcagatcctcaaagagcaccctgttgagaacactcagctccagaatgagaagctctacctctactacctccagaacggaagggatatgtatgtggatcaagagttggatatcaacaggctctctgattacgatgttgatcatatcgtgccacagtcattcttgaaggatgattctatcgataacaaggtgctcaccaggtctgataagaacaggggtaagagtgataacgtgccaagtgaagaggttgtgaagaaaatgaagaactattggaggcagctcctcaacgctaagctcatcactcagagaaagttcgataacttgactaaggctgagaggggaggactctctgaattggataaggcaggattcatcaagaggcagcttgtggaaaccaggcagatcactaagcacgttgcacagatcctcgattctaggatgaacaccaagtacgatgagaacgataagttgatcagggaagtgaaggttatcaccctcaagtcaaagctcgtgtctgatttcagaaaggatttccaattctacaaggtgagggaaatcaacaactaccaccacgctcacgatgcttaccttaacgctgttgttggaaccgctctcatcaagaagtatcctaagctcgagtcagagttcgtgtacggtgattacaaggtgtacgatgtgaggaagatgatcgctaagtctgagcaagagatcggaaaggctaccgctaagtatttcttctactctaacatcatgaatttcttcaagaccgagattaccctcgctaacggtgagatcagaaagaggccactcatcgagacaaacggtgaaacaggtgagatcgtgtgggataagggaagggatttcgctaccgttagaaaggtgctctctatgccacaggtgaacatcgttaagaaaaccgaggtgcagaccggtggattctctaaagagtctatcctccctaagaggaactctgataagctcattgctaggaagaaggattgggaccctaagaaatacggtggtttcgattctcctaccgtggcttactctgttctcgttgtggctaaggttgagaagggaaagagtaagaagctcaagtctgttaaggaacttctcggaatcactatcatggaaaggtcatctttcgagaagaacccaatcgatttcctcgaggctaagggatacaaagaggttaagaaggatctcatcatcaagctcccaaagtactcactcttcgaactcgagaacggtagaaagaggatgctcgcttctgctggtgagcttcaaaagggaaacgagcttgctctcccatctaagtacgttaactttctttacctcgcttctcactacgagaagttgaagggatctccagaagataacgagcagaagcaacttttcgttgagcagcacaagcactacttggatgagatcatcgagcagatctctgagttctctaaaagggtgatcctcgctgatgcaaacctcgataaggtgttgtctgcttacaacaagcacagagataagcctatcagggaacaggcagagaacatcatccatctcttcacccttaccaacctcggtgctcctgctgctttcaagtacttcgatacaaccatcgataggaagagatacacctctaccaaagaagtgctcgatgctaccctcatccatcagtctatcactggactctacgagactaggatcgatctctcacagctcggtggtgattcaagggctgatcctaagaagaagaggaaggtttgagcggccgcgatcgttcaaacatttggcaataaagtttcttaagattgaatcctgttgccggtcttgcgatgattatcatataatttctgttgaattacgttaagcatgtaataattaacatgtaatgcatgacgttatttatgagatgggtttttatgattagagtcccgcaattatacatttaatacgcgatagaaaacaaaatatagcgcgcaaactaggataaattatcgcgcgcggtgtcatctatgttactagatcggatccgcatgcaagcttggcgtaatcatggtcatagctgtttcctgtgtgaaattgttatccgctcacaattccacacaacatacgagccggaagcataaagtgtaaagcctggggtgcctaatgagtgagctaactcacattaattgcgttgcgctcactgcccgctttccagtcgggaaacctgtcgtgccagctgcattaatgaatcggccaacgcgcggggagaggcggtttgcgtattgggcgctcttccgcttcctcgctcactgactcgctgcgctcggtcgttcggctgcggcgagcggtatcagctcactcaaaggcggtaatacggttatccacagaatcaggggataacgcaggaaagaacatgtgagcaaaaggccagcaaaaggccaggaaccgtaaaaaggccgcgttgctggcgtttttccataggctccgcccccctgacgagcatcacaaaaatcgacgctcaagtcagaggtggcgaaacccgacaggactataaagataccaggcgtttccccctggaagctccctcgtgcgctctcctgttccgaccctgccgcttaccggatacctgtccgcctttctcccttcgggaagcgtggcgctttctcatagctcacgctgtaggtatctcagttcggtgtaggtcgttcgctccaagctgggctgtgtgcacgaaccccccgttcagcccgaccgctgcgccttatccggtaactatcgtcttgagtccaacccggtaagacacgacttatcgccactggcagcagccactggtaacaggattagcagagcgaggtatgtaggcggtgctacagagttcttgaagtggtggcctaactacggctacactagaagaacagtatttggtatctgcgctctgctgaagccagttaccttcggaaaaagagttggtagctcttgatccggcaaacaaaccaccgctggtagcggtggtttttttgtttgcaagcagcagattacgcgcagaaaaaaaggatctcaagaagatcctttgatcttttctacggggtctgacgctcagtggaacgaaaactcacgttaagggattttggtcatgagattatcaaaaaggatcttcacctagatccttttaaattaaaaatgaagttttaaatcaatctaaagtatatatgagtaaacttggtctgacagttaccaatgcttaatcagtgaggcacctatctcagcgatctgtctatttcgttcatccatagttgcctgactccccgtcgtgtagataactacgatacgggagggcttaccatctggccccagtgctgcaatgataccgcgagacccacgctcaccggctccagatttatcagcaataaaccagccagccggaagggccgagcgcagaagtggtcctgcaactttatccgcctccatccagtctattaattgttgccgggaagctagagtaagtagttcgccagttaatagtttgcgcaacgttgttgccattgctacaggcatcgtggtgtcacgctcgtcgtttggtatggcttcattcagctccggttcccaacgatcaaggcgagttacatgatcccccatgttgtgcaaaaaagcggttagctccttcggtcctccgatcgttgtcagaagtaagttggccgcagtgttatcactcatggttatggcagcactgcataattctcttactgtcatgccatccgtaagatgcttttctgtgactggtgagtactcaaccaagtcattctgagaatagtgtatgcggcgaccgagttgctcttgcccggcgtcaatacgggataataccgcgccacatagcagaactttaaaagtgctcatcattggaaaacgttcttcggggcgaaaactctcaaggatcttaccgctgttgagatccagttcgatgtaacccactcgtgcacccaactgatcttcagcatcttttactttcaccagcgtttctgggtgagcaaaaacaggaaggcaaaatgccgcaaaaaagggaataagggcgacacggaaatgttgaatactcatactcttcctttttcaatattattgaagcatttatcagggttattgtctcatgagcggatacatatttgaatgtatttagaaaaataaacaaataggggttccgcgcacatttccccgaaaagtgccacctgacgtctaagaaaccattattatcatgacattaacctataaaaataggcgtatcacgaggccctttcgtc

SEQ ID NO: 682 - DNA, 4104 bp, synthetic construct
  source 1..4104: mol_type = other DNA
atggataagaagtactctatcggactcgatatcggaactaactctgtgggatgggctgtgatcaccgatgagtacaaggtgccatctaagaagttcaaggttctcggaaacaccgataggcactctatcaagaaaaaccttatcggtgctctcctcttcgattctggtgaaactgctgaggctaccagactcaagagaaccgctagaagaaggtacaccagaagaaagaacaggatctgctacctccaagagatcttctctaacgagatggctaaagtggatgattcattcttccacaggctcgaagagtcattcctcgtggaagaagataagaagcacgagaggcaccctatcttcggaaacatcgttgatgaggtggcataccacgagaagtaccctactatctaccacctcagaaagaagctcgttgattctactgataaggctgatctcaggctcatctacctcgctctcgctcacatgatcaagttcagaggacacttcctcatcgagggtgatctcaaccctgataactctgatgtggataagttgttcatccagctcgtgcagacctacaaccagcttttcgaagagaaccctatcaacgcttcaggtgtggatgctaaggctatcctctctgctaggctctctaagtcaagaaggcttgagaacctcattgctcagctccctggtgagaagaagaacggacttttcggaaacttgatcgctctctctctcggactcacccctaacttcaagtctaacttcgatctcgctgaggatgcaaagctccagctctcaaaggatacctacgatgatgatctcgataacctcctcgctcagatcggagatcagtacgctgatttgttcctcgctgctaagaacctctctgatgctatcctcctcagtgatatcctcagagtgaacaccgagatcaccaaggctccactctcagcttctatgatcaagagatacgatgagcaccaccaggatctcacacttctcaaggctcttgttagacagcagctcccagagaagtacaaagagattttcttcgatcagtctaagaacggatacgctggttacatcgatggtggtgcatctcaagaagagttctacaagttcatcaagcctatcctcgagaagatggatggaaccgaggaactcctcgtgaagctcaatagagaggatcttctcagaaagcagaggaccttcgataacggatctatccctcatcagatccacctcggagagttgcacgctatccttagaaggcaagaggatttctacccattcctcaaggataacagggaaaagattgagaagattctcaccttcagaatcccttactacgtgggacctctcgctagaggaaactcaagattcgcttggatgaccagaaagtctgaggaaaccatcaccccttggaacttcgaagaggtggtggataagggtgctagtgctcagtctttcatcgagaggatgaccaacttcgataagaaccttccaaacgagaaggtgctccctaagcactctttgctctacgagtacttcaccgtgtacaacgagttgaccaaggttaagtacgtgaccgagggaatgaggaagcctgcttttttgtcaggtgagcaaaagaaggctatcgttgatctcttgttcaagaccaacagaaaggtgaccgtgaagcagctcaaagaggattacttcaagaaaatcgagtgcttcgattcagttgagatttctggtgttgaggataggttcaacgcatctctcggaacctaccacgatctcctcaagatcattaaggataaggatttcttggataacgaggaaaacgaggatatcttggaggatatcgttcttaccctcaccctctttgaagatagagagatgattgaagaaaggctcaagacctacgctcatctcttcgatgataaggtgatgaagcagttgaagagaagaagatacactggttggggaaggctctcaagaaagctcattaacggaatcagggataagcagtctggaaagacaatccttgatttcctcaagtctgatggattcgctaacagaaacttcatgcagctcatccacgatgattctctcacctttaaagaggatatccagaaggctcaggtttcaggacagggtgatagtctccatgagcatatcgctaacctcgctggatctcctgcaatcaagaagggaatcctccagactgtgaaggttgtggatgagttggtgaaggtgatgggaaggcataagcctgagaacatcgtgatcgaaatggctagagagaaccagaccactcagaagggacagaagaactctagggaaaggatgaagaggatcgaggaaggtatcaaagagcttggatctcagatcctcaaagagcaccctgttgagaacactcagctccagaatgagaagctctacctctactacctccagaacggaagggatatgtatgtggatcaagagttggatatcaacaggctctctgattacgatgttgatcatatcgtgccacagtcattcttgaaggatgattctatcgataacaaggtgctcaccaggtctgataagaacaggggtaagagtgataacgtgccaagtgaagaggttgtgaagaaaatgaagaactattggaggcagctcctcaacgctaagctcatcactcagagaaagttcgataacttgactaaggctgagaggggaggactctctgaattggataaggcaggattcatcaagaggcagcttgtggaaaccaggcagatcactaagcacgttgcacagatcctcgattctaggatgaacaccaagtacgatgagaacgataagttgatcagggaagtgaaggttatcaccctcaagtcaaagctcgtgtctgatttcagaaaggatttccaattctacaaggtgagggaaatcaacaactaccaccacgctcacgatgcttaccttaacgctgttgttggaaccgctctcatcaagaagtatcctaagctcgagtcagagttcgtgtacggtgattacaaggtgtacgatgtgaggaagatgatcgctaagtctgagcaagagatcggaaaggctaccgctaagtatttcttctactctaacatcatgaatttcttcaagaccgagattaccctcgctaacggtgagatcagaaagaggccactcatcgagacaaacggtgaaacaggtgagatcgtgtgggataagggaagggatttcgctaccgttagaaaggtgctctctatgccacaggtgaacatcgttaagaaaaccgaggtgcagaccggtggattctctaaagagtctatcctccctaagaggaactctgataagctcattgctaggaagaaggattgggaccctaagaaatacggtggtttcgattctcctaccgtggcttactctgttctcgttgtggctaaggttgagaagggaaagagtaagaagctcaagtctgttaaggaacttctcggaatcactatcatggaaaggtcatctttcgagaagaacccaatcgatttcctcgaggctaagggatacaaagaggttaagaaggatctcatcatcaagctcccaaagtactcactcttcgaactcgagaacggtagaaagaggatgctcgcttctgctggtgagcttcaaaagggaaacgagcttgctctcccatctaagtacgttaactttctttacctcgcttctcactacgagaagttgaagggatctccagaagataacgagcagaagcaacttttcgttgagcagcacaagcactacttggatgagatcatcgagcagatctctgagttctctaaaagggtgatcctcgctgatgcaaacctcgataaggtgttgtctgcttacaacaagcacagagataagcctatcagggaacaggcagagaacatcatccatctcttcacccttaccaacctcggtgctcctgctgctttcaagtacttcgatacaaccatcgataggaagagatacacctctaccaaagaagtgctcgatgctaccctcatccatcagtctatcactggactctacgagactaggatcgatctctcacagctcggtggtgat

SEQ ID NO: 683 - protein, 1368 aa, Streptococcus pyogenes [sequence omitted]

SEQ ID NO: 684 - DNA, 21 bp, Betapolyomavirus macacae
  source 1..21: mol_type = genomic DNA
cctaagaagaagaggaaggtt

SEQ ID NO: 685 - protein, 7 aa, Betapolyomavirus macacae
PKKKRKV

SEQ ID NO: 686 - DNA, 4137 bp, synthetic construct
  source 1..4137: mol_type = other DNA
atggataagaagtactctatcggactcgatatcggaactaactctgtgggatgggctgtgatcaccgatgagtacaaggtgccatctaagaagttcaaggttctcggaaacaccgataggcactctatcaagaaaaaccttatcggtgctctcctcttcgattctggtgaaactgctgaggctaccagactcaagagaaccgctagaagaaggtacaccagaagaaagaacaggatctgctacctccaagagatcttctctaacgagatggctaaagtggatgattcattcttccacaggctcgaagagtcattcctcgtggaagaagataagaagcacgagaggcaccctatcttcggaaacatcgttgatgaggtggcataccacgagaagtaccctactatctaccacctcagaaagaagctcgttgattctactgataaggctgatctcaggctcatctacctcgctctcgctcacatgatcaagttcagaggacacttcctcatcgagggtgatctcaaccctgataactctgatgtggataagttgttcatccagctcgtgcagacctacaaccagcttttcgaagagaaccctatcaacgcttcaggtgtggatgctaaggctatcctctctgctaggctctctaagtcaagaaggcttgagaacctcattgctcagctccctggtgagaagaagaacggacttttcggaaacttgatcgctctctctctcggactcacccctaacttcaagtctaacttcgatctcgctgaggatgcaaagctccagctctcaaaggatacctacgatgatgatctcgataacctcctcgctcagatcggagatcagtacgctgatttgttcctcgctgctaagaacctctctgatgctatcctcctcagtgatatcctcagagtgaacaccgagatcaccaaggctccactctcagcttctatgatcaagagatacgatgagcaccaccaggatctcacacttctcaaggctcttgttagacagcagctcccagagaagtacaaagagattttcttcgatcagtctaagaacggatacgctggttacatcgatggtggtgcatctcaagaagagttctacaagttcatcaagcctatcctcgagaagatggatggaaccgaggaactcctcgtgaagctcaatagagaggatcttctcagaaagcagaggaccttcgataacggatctatccctcatcagatccacctcggagagttgcacgctatccttagaaggcaagaggatttctacccattcctcaaggataacagggaaaagattgagaagattctcaccttcagaatcccttactacgtgggacctctcgctagaggaaactcaagattcgcttggatgaccagaaagtctgaggaaaccatcaccccttggaacttcgaagaggtggtggataagggtgctagtgctcagtctttcatcgagaggatgaccaacttcgataagaaccttccaaacgagaaggtgctccctaagcactctttgctctacgagtacttcaccgtgtacaacgagttgaccaaggttaagtacgtgaccgagggaatgaggaagcctgcttttttgtcaggtgagcaaaagaaggctatcgttgatctcttgttcaagaccaacagaaaggtgaccgtgaagcagctcaaagaggattacttcaagaaaatcgagtgcttcgattcagttgagatttctggtgttgaggataggttcaacgcatctctcggaacctaccacgatctcctcaagatcattaaggataaggatttcttggataacgaggaaaacgaggatatcttggaggatatcgttcttaccctcaccctctttgaagatagagagatgattgaagaaaggctcaagacctacgctcatctcttcgatgataaggtgatgaagcagttgaagagaagaagatacactggttggggaaggctctcaagaaagctcattaacggaatcagggataagcagtctggaaagacaatccttgatttcctcaagtctgatggattcgctaacagaaacttcatgcagctcatccacgatgattctctcacctttaaagaggatatccagaaggctcaggtttcaggacagggtgatagtctccatgagcatatcgctaacctcgctggatctcctgcaatcaagaagggaatcctccagactgtgaaggttgtggatgagttggtgaaggtgatgggaaggcataagcctgagaacatcgtgatcgaaatggctagagagaaccagaccactcagaagggacagaagaactctagggaaaggatgaagaggatcgaggaaggtatcaaagagcttggatctcagatcctcaaagagcaccctgttgagaacactcagctccagaatgagaagctctacctctactacctccagaacggaagggatatgtatgtggatcaagagttggatatcaacaggctctctgattacgatgttgatcatatcgtgccacagtcattcttgaaggatgattctatcgataacaaggtgctcaccaggtctgataagaacaggggtaagagtgataacgtgccaagtgaagaggttgtgaagaaaatgaagaactattggaggcagctcctcaacgctaagctcatcactcagagaaagttcgataacttgactaaggctgagaggggaggactctctgaattggataaggcaggattcatcaagaggcagcttgtggaaaccaggcagatcactaagcacgttgcacagatcctcgattctaggatgaacaccaagtacgatgagaacgataagttgatcagggaagtgaaggttatcaccctcaagtcaaagctcgtgtctgatttcagaaaggatttccaattctacaaggtgagggaaatcaacaactaccaccacgctcacgatgcttaccttaacgctgttgttggaaccgctctcatcaagaagtatcctaagctcgagtcagagttcgtgtacggtgattacaaggtgtacgatgtgaggaagatgatcgctaagtctgagcaagagatcggaaaggctaccgctaagtatttcttctactctaacatcatgaatttcttcaagaccgagattaccctcgctaacggtgagatcagaaagaggccactcatcgagacaaacggtgaaacaggtgagatcgtgtgggataagggaagggatttcgctaccgttagaaaggtgctctctatgccacaggtgaacatcgttaagaaaaccgaggtgcagaccggtggattctctaaagagtctatcctccctaagaggaactctgataagctcattgctaggaagaaggattgggaccctaagaaatacggtggtttcgattctcctaccgtggcttactctgttctcgttgtggctaaggttgagaagggaaagagtaagaagctcaagtctgttaaggaacttctcggaatcactatcatggaaaggtcatctttcgagaagaacccaatcgatttcctcgaggctaagggatacaaagaggttaagaaggatctcatcatcaagctcccaaagtactcactcttcgaactcgagaacggtagaaagaggatgctcgcttctgctggtgagcttcaaaagggaaacgagcttgctctcccatctaagtacgttaactttctttacctcgcttctcactacgagaagttgaagggatctccagaagataacgagcagaagcaacttttcgttgagcagcacaagcactacttggatgagatcatcgagcagatctctgagttctctaaaagggtgatcctcgctgatgcaaacctcgataaggtgttgtctgcttacaacaagcacagagataagcctatcagggaacaggcagagaacatcatccatctcttcacccttaccaacctcggtgctcctgctgctttcaagtacttcgatacaaccatcgataggaagagatacacctctaccaaagaagtgctcgatgctaccctcatccatcagtctatcactggactctacgagactaggatcgatctctcacagctcggtggtgattcaagggctgatcctaagaagaagaggaaggtt

SEQ ID NO: 687 - protein, 1379 aa, synthetic construct
MDKKYSIGLDIGTNSVGWAVITDEYKVPSKKFKVLGNTDRHSIKKNLIGALLFDSGETAEATRLKRTARRRYTRRKNRICYLQEIFSNEMAKVDDSFFHRLEESFLVEEDKKHERHPIFGNIVDEVAYHEKYPTIYHLRKKLVDSTDKADLRLIYLALAHMIKFRGHFLIEGDLNPDNSDVDKLFIQLVQTYNQLFEENPINASGVDAKAILSARLSKSRRLENLIAQLPGEKKNGLFGNLIALSLGLTPNFKSNFDLAEDAKLQLSKDTYDDDLDNLLAQIGDQYADLFLAAKNLSDAILLSDILRVNTEITKAPLSASMIKRYDEHHQDLTLLKALVRQQLPEKYKEIFFDQSKNGYAGYIDGGASQEEFYKFIKPILEKMDGTEELLVKLNREDLLRKQRTFDNGSIPHQIHLGELHAILRRQEDFYPFLKDNREKIEKILTFRIPYYVGPLARGNSRFAWMTRKSEETITPWNFEEVVDKGASAQSFIERMTNFDKNLPNEKVLPKHSLLYEYFTVYNELTKVKYVTEGMRKPAFLSGEQKKAIVDLLFKTNRKVTVKQLKEDYFKKIECFDSVEISGVEDRFNASLGTYHDLLKIIKDKDFLDNEENEDILEDIVLTLTLFEDREMIEERLKTYAHLFDDKVMKQLKRRRYTGWGRLSRKLINGIRDKQSGKTILDFLKSDGFANRNFMQLIHDDSLTFKEDIQKAQVSGQGDSLHEHIANLAGSPAIKKGILQTVKVVDELVKVMGRHKPENIVIEMARENQTTQKGQKNSRERMKRIEEGIKELGSQILKEHPVENTQLQNEKLYLYYLQNGRDMYVDQELDINRLSDYDVDHIVPQSFLKDDSIDNKVLTRSDKNRGKSDNVPSEEVVKKMKNYWRQLLNAKLITQRKFDNLTKAERGGLSELDKAGFIKRQLVETRQITKHVAQILDSRMNTKYDENDKLIREVKVITLKSKLVSDFRKDFQFYKVREINNYHHAHDAYLNAVVGTALIKKYPKLESEFVYGDYKVYDVRKMIAKSEQEIGKATAKYFFYSNIMNFFKTEITLANGEIRKRPLIETNGETGEIVWDKGRDFATVRKVLSMPQVNIVKKTEVQTGGFSKESILPKRNSDKLIARKKDWDPKKYGGFDSPTVAYSVLVVAKVEKGKSKKLKSVKELLGITIMERSSFEKNPIDFLEAKGYKEVKKDLIIKLPKYSLFELENGRKRMLASAGELQKGNELALPSKYVNFLYLASHYEKLKGSPEDNEQKQLFVEQHKHYLDEIIEQISEFSKRVILADANLDKVLSAYNKHRDKPIREQAENIIHLFTLTNLGAPAAFKYFDTTIDRKRYTSTKEVLDATLIHQSITGLYETRIDLSQLGGDSRADPKKKRKV

SEQ ID NO: 688 - protein, 13 aa, Human immunodeficiency virus 1
GRKKRRQRRRPPQ

SEQ ID NO: 689 - protein, 12 aa, Human immunodeficiency virus 1
GRKKRRQRRRPQ

SEQ ID NO: 690 - protein, 11 aa, Human immunodeficiency virus 1
YGRKKRRQRRR

SEQ ID NO: 691 - protein, 18 aa, unidentified
KLALKLALKALKAALKLA

SEQ ID NO: 692 - protein, 16 aa, unidentified
RQIRIWFQNRRMRWRR

SEQ ID NO: 693 - protein, 17 aa, unidentified
CSIPPEVKFNKPFVYLI

SEQ ID NO: 694 - protein, 30 aa, unidentified
RRRQRRKKRGGDIMGEWGNEIFGAIAGFLG

SEQ ID NO: 695 - protein, 13 aa, unidentified
FVQWFSKFLGRIL

SEQ ID NO: 696 - protein, 18 aa, unidentified
LLIILRRRIRKQAHAHSK

SEQ ID NO: 697 - protein, 24 aa, unidentified
LGTYTQDFNKFHTFPQTAIGVGAP

SEQ ID NO: 698 - protein, 30 aa, unidentified
GAAEAAARVYDLGLRRLRQRRRLRRERVRA

SEQ ID NO: 699 - protein, 27 aa, Homo sapiens
MGLGLHLLVLAAALQGAWSQPKKKRKV

SEQ ID NO: 700 - protein, 18 aa, unidentified
RQIKIWFQNRRMKWKKGG

SEQ ID NO: 701 - protein, 8 aa, synthetic construct
RRRRRRRR

SEQ ID NO: 702 - protein, 9 aa, synthetic construct
RRRRRRRRR

SEQ ID NO: 703 - protein, 30 aa, synthetic construct
KKLFKKILKYLKKLFKKILKYLKKKKKKKK

SEQ ID NO: 704 - DNA, 14548 bp, synthetic construct
  source 1..14548: mol_type = other DNA
agtactttgatccaacccctccgctgctatagtgcagtcggcttctgacgttcagtgcagccgtcttctgaaaacgacatgtcgcacaagtcctaagttacgcgacaggctgccgccctgcccttttcctggcgttttcttgtcgcgtgttttagtcgcataaagtagaatacttgcgactagaaccggagacattacgccatgaacaagagcgccgccgctggcctgctgggctatgcccgcgtcagcaccgacgaccaggacttgaccaaccaacgggccgaactgcacgcggccggctgcaccaagctgttttccgagaagatcaccggcaccaggcgcgaccgcccggagctggccaggatgcttgaccacctacgccctggcgacgttgtgacagtgaccaggctagaccgcctggcccgcagcacccgcgacctactggacattgccgagcgcatccaggaggccggcgcgggcctgcgtagcctggcagagccgtgggccgacaccaccacgccggccggccgcatggtgttgaccgtgttcgccggcattgccgagttcgagcgttccctaatcatcgaccgcacccggagcgggcgcgaggccgccaaggcccgaggcgtgaagtttggcccccgccctaccctcaccccggcacagatcgcgcacgcccgcgagctgatcgaccaggaaggccgcaccgtgaaagaggcggctgcactgcttggcgtgcatcgctcgaccctgtaccgcgcacttgagcgcagcgaggaagtgacgcccaccgaggccaggcggcgcggtgccttccgtgaggacgcattgaccgaggccgacgccctggcggccgccgagaatgaacgccaagaggaacaagcatgaaaccgcaccaggacggccaggacgaaccgtttttcattaccgaagagatcgaggcggagatgatcgcggccgggtacgtgttcgagccgcccgcgcacgtctcaaccgtgcggctgcatgaaatcctggccggtttgtctgatgccaagctggcggcctggccggccagcttggccgctgaagaaaccgagcgccgccgtctaaaaaggtgatgtgtatttgagtaaaacagcttgcgtcatgcggtcgctgcgtatatgatgcgatgagtaaataaacaaatacgcaaggggaacgcatgaaggttatcgctgtacttaaccagaaaggcgggtcaggcaagacgaccatcgcaacccatctagcccgcgccctgcaactcgccggggccgatgttctgttagtcgattccgatccccagggcagtgcccgcgattgggcggccgtgcgggaagatcaaccgctaaccgttgtcggcatcgaccgcccgacgattgaccgcgacgtgaaggccatcggccggcgcgacttcgtagtgatcgacggagcgccccaggcggcggacttggctgtgtccgcgatcaaggcagccgacttcgtgctgattccggtgcagccaagcccttacgacatatgggccaccgccgacctggtggagctggttaagcagcgcattgaggtcacggatggaaggctacaagcggcctttgtcgtgtcgcgggcgatcaaaggcacgcgcatcggcggtgaggttgccgaggcgctggccgggtacgagctgcccattcttgagtcccgtatcacgcagcgcgtgagctacccaggcactgccgccgccggcacaaccgttcttgaatcagaacccgagggcgacgctgcccgcgaggtccaggcgctggccgctgaaattaaatcaaaactcatttgagttaatgaggtaaagagaaaatgagcaaaagcacaaacacgctaagtgccggccgtccgagcgcacgcagcagcaaggctgcaacgttggccagcctggcagacacgccagccatgaagcgggtcaactttcagttgccggcggaggatcacaccaagctgaagatgtacgcggtacgccaaggcaagaccattaccgagctgctatctgaatacatcgcgcagctaccagagtaaatgagcaaatgaataaatgagtagatgaattttagcggctaaaggaggcggcatggaaaatcaagaacaaccaggcaccgacgccgtggaatgccccatgtgtggaggaacgggcggttggccaggcgtaagcggctgggttgtctgccggccctgcaatggcactggaacccccaagcccgaggaatcggcgtgacggtcgcaaaccatccggcccggtacaaatcggcgcggcgctgggtgatgacctggtggagaagttgaaggccgcgcaggccgcccagcggcaacgcatcgaggcagaagcacgccccggtgaatcgtggcaagcggccgctgatcgaatccgcaaagaatcccggcaaccgccggcagccggtgcgccgtcgattaggaagccgcccaagggcgacgagcaaccagattttttcgttccgatgctctatgacgtgggcacccgcgatagtcgcagcatcatggacgtggccgttttccgtctgtcgaagcgtgaccgacgagctggcgaggtgatccgctacgagcttccagacgggcacgtagaggtttccgcagggccggccggcatggccagtgtgtgggattacgacctggtactgatggcggtttcccatctaaccgaatccatgaaccgataccgggaagggaagggagacaagcccggccgcgtgttccgtccacacgttgcggacgtactcaagttctgccggcgagccgatggcggaaagcagaaagacgacctggtagaaacctgcattcggttaaacaccacgcacgttgccatgcagcgtacgaagaaggccaagaacggccgcctggtgacggtatccgagggtgaagccttgattagccgctacaagatcgtaaagagcgaaaccgggcggccggagtacatcgagatcgagctagctgattggatgtaccgcgagatcacagaaggcaagaacccggacgtgctgacggttcaccccgattactttttgatcgatcccggcatcggccgttttctctaccgcctggcacgccgcgccgcaggcaaggcagaagccagatggttgttcaagacgatctacgaacgcagtggcagcgccggagagttcaagaagttctgtttcaccgtgcgcaagctgatcgggtcaaatgacctgccggagtacgatttgaaggaggaggcggggcaggctggcccgatcctagtcatgcgctaccgcaacctgatcgagggcgaagcatccgccggttcctaatgtacggagcagatgctagggcaaattgccctagcaggggaaaaaggtcgaaaaggtctctttcctgtggatagcacgtacattgggaacccaaagccgtacattgggaaccggaacccgtacattgggaacccaaagccgtacattgggaaccggtcacacatgtaagtgactgatataaaagagaaaaaaggcgatttttccgcctaaaactctttaaaacttattaaaactcttaaaacccgcctggcctgtgcataactgtctggccagcgcacagccgaagagctgcaaaaagcgcctacccttcggtcgctgcgctccctacgccccgccgcttcgcgtcggcctatcgcggccgctggccgctcaaaaatggctggcctacggccaggcaatctaccagggcgcggacaagccgcgccgtcgccactcgaccgccggcgcccacatcaaggcaccctgcctcgcgcgtttcggtgatgacggtgaaaacctctgacacatgcagctcccggagacggtcacagcttgtctgtaagcggatgccgggagcagacaagcccgtcagggcgcgtcagcgggtgttggcgggtgtcggggcgcagccatgacccagtcacgtagcgatagcggagtgtatactggcttaactatgcggcatcagagcagattgtactgagagtgcaccatatgcggtgtgaaataccgcacagatgcgtaaggagaaaataccgcatcaggcgctcttccgcttcctcgctcactgactcgctgcgctcggtcgttcggctgcggcgagcggtatcagctcactcaaaggcggtaatacggttatccacagaatcaggggataacgcaggaaagaacatgtgagcaaaaggccagcaaaaggccaggaaccgtaaaaaggccgcgttgctggcgtttttccataggctccgcccccctgacgagcatcacaaaaatcgacgctcaagtcagaggtggcgaaacccgacaggactataaagataccaggcgtttccccctggaagctccctcgtgcgctctcctgttccgaccctgccgcttaccggatacctgtccgcctttctcccttcgggaagcgtggcgctttctcatagctcacgctgtaggtatctcagttcggtgtaggtcgttcgctccaagctgggctgtgtgcacgaaccccccgttcagcccgaccgctgcgccttatccggtaactatcgtcttgagtccaacccggtaagacacgacttatcgccactggcagcagccactggtaacaggattagcagagcgaggtatgtaggcggtgctacagagttcttgaagtggtggcctaactacggctacactagaaggacagtatttggtatctgcgctctgctgaagccagttaccttcggaaaaagagttggtagctcttgatccggcaaacaaaccaccgctggtagcggtggtttttttgtttgcaagcagcagattacgcgcagaaaaaaaggatctcaagaagatcctttgatcttttctacggggtctgacgctcagtggaacgaaaactcacgttaagggattttggtcatgcatgatatatctcccaatttgtgtagggcttattatgcacgcttaaaaataataaaagcagacttgacctgatagtttggctgtgagcaattatgtgcttagtgcatctaatcgcttgagttaacgccggcgaagcggcgtcggcttgaacgaatttctagctagacattatttgccgactaccttggtgatctcgcctttcacgtagtggacaaattcttccaactgatctgcgcgcgaggccaagcgatcttcttcttgtccaagataagcctgtctagcttcaagtatgacgggctgatactgggccggcaggcgctccattgcccagtcggcagcgacatccttcggcgcgattttgccggttactgcgctgtaccaaatgcgggacaacgtaagcactacatttcgctcatcgccagcccagtcgggcggcgagttccatagcgttaaggtttcatttagcgcctcaaatagatcctgttcaggaaccggatcaaagagttcctccgccgctggacctaccaaggcaacgctatgttctcttgcttttgtcagcaagatagccagatcaatgtcgatcgtggctggctcgaagatacctgcaagaatgtcattgcgctgccattctccaaattgcagttcgcgcttagctggataacgccacggaatgatgtcgtcgtgcacaacaatggtgacttctacagcgcggagaatctcgctctctccaggggaagccgaagtttccaaaaggtcgttgatcaaagctcgccgcgttgtttcatcaagccttacggtcaccgtaaccagcaaatcaatatcactgtgtggcttcaggccgccatccactgcggagccgtacaaatgtacggccagcaacgtcggttcgagatggcgctcgatgacgccaactacctctgatagttgagtcgatacttcggcgatcaccgcttcccccatgatgtttaactttgttttagggcgactgccctgctgcgtaacatcgttgctgctccataacatcaaacatcgacccacggcgtaacgcgcttgctgcttggatgcccgaggcatagactgtaccccaaaaaaacatgtcataacaagaagccatgaaaaccgccactgcgccgttaccaccgctgcgttcggtcaaggttctggaccagttgcgtgacggcagttacgctacttgcattacagcttacgaaccgaacgaggcttatgtccactgggttcgtgcccgaattgatcacaggcagcaacgctctgtcatcgttacaatcaacatgctaccctccgcgagatcatccgtgtttcaaacccggcagcttagttgccgttcttccgaatagcatcggtaacatgagcaaagtctgccgccttacaacggctctcccgctgacgccgtcccggactgatgggctgcctgtatcgagtggtgattttgtgccgagctgccggtcggggagctgttggctggctggtggcaggatatattgtggtgtaaacaaattgacgcttagacaacttaataacacattgcggacgtttttaatgtactgaattaacgccgaattgctctagccaatacgcaaaccgcctctccccgcgcgttggccgattcattaatgcagctggcacgacaggtttcccgactggaaagcgggcagtgagcgcaacgcaattaatgtgagttagctcactcattaggcaccccaggctttacactttatgcttccggctcgtatgttgtgtggaattgtgagcggataacaatttcacacaggaaacagctatgacatgattacgaattcaaaaattacggatatgaatataggcatatccgtatccgaattatccgtttgacagctagcaacgattgtacaattgcttctttaaaaaaggaagaaagaaagaaagaaaagaatcaacatcagcgttaacaaacggccccgttacggcccaaacggtcatatagagtaacggcgttaagcgttgaaagactcctatcgaaatacgtaaccgcaaacgtgtcatagtcagatcccctcttccttcaccgcctcaaacacaaaaataatcttctacagcctatatatacaacccccccttctatctctcctttctcacaattcatcatctttctttctctacccccaattttaagaaatcctctcttctcctcttcattttcaaggtaaatctctctctctctctctctctctgttattccttgttttaattaggtatgtattattgctagtttgttaatctgcttatcttatgtatgccttatgtgaatatctttatcttgttcatctcatccgtttagaagctataaatttgttgatttgactgtgtatctacacgtggttatgtttatatctaatcagatatgaatttcttcatattgttgcgtttgtgtgtaccaatccgaaatcgttgatttttttcatttaatcgtgtagctaattgtacgtatacatatggatctacgtatcaattgttcatctgtttgtgtttgtatgtatacagatctgaaaacatcacttctctcatctgattgtgttgttacatacatagatatagatctgttatatcattttttttattaattgtgtatatatatatgtgcatagatctggattacatgattgtgattatttacatgattttgttatttacgtatgtatatatgtagatctggactttttggagttgttgacttgattgtatttgtgtgtgtatatgtgtgttctgatcttgatatgttatgtatgtgcagcgaattcggcgcgccatggataagaagtactctatcggactcgatatcggaactaactctgtgggatgggctgtgatcaccgatgagtacaaggtgccatctaagaagttcaaggttctcggaaacaccgataggcactctatcaagaaaaaccttatcggtgctctcctcttcgattctggtgaaactgctgaggctaccagactcaagagaaccgctagaagaaggtacaccagaagaaagaacaggatctgctacctccaagagatcttctctaacgagatggctaaagtggatgattcattcttccacaggctcgaagagtcattcctcgtggaagaagataagaagcacgagaggcaccctatcttcggaaacatcgttgatgaggtggcataccacgagaagtaccctactatctaccacctcagaaagaagctcgttgattctactgataaggctgatctcaggctcatctacctcgctctcgctcacatgatcaagttcagaggacacttcctcatcgagggtgatctcaaccctgataactctgatgtggataagttgttcatccagctcgtgcagacctacaaccagcttttcgaagagaaccctatcaacgcttcaggtgtggatgctaaggctatcctctctgctaggctctctaagtcaagaaggcttgagaacctcattgctcagctccctggtgagaagaagaacggacttttcggaaacttgatcgctctctctctcggactcacccctaacttcaagtctaacttcgatctcgctgaggatgcaaagctccagctctcaaaggatacctacgatgatgatctcgataacctcctcgctcagatcggagatcagtacgctgatttgttcctcgctgctaagaacctctctgatgctatcctcctcagtgatatcctcagagtgaacaccgagatcaccaaggctccactctcagcttctatgatcaagagatacgatgagcaccaccaggatctcacacttctcaaggctcttgttagacagcagctcccagagaagtacaaagagattttcttcgatcagtctaagaacggatacgctggttacatcgatggtggtgcatctcaagaagagttctacaagttcatcaagcctatcctcgagaagatggatggaaccgaggaactcctcgtgaagctcaatagagaggatcttctcagaaagcagaggaccttcgataacggatctatccctcatcagatccacctcggagagttgcacgctatccttagaaggcaagaggatttctacccattcctcaaggataacagggaaaagattgagaagattctcaccttcagaatcccttactacgtgggacctctcgctagaggaaactcaagattcgcttggatgaccagaaagtctgaggaaaccatcaccccttggaacttcgaagaggtggtggataagggtgctagtgctcagtctttcatcgagaggatgaccaacttcgataagaaccttccaaacgagaaggtgctccctaagcactctttgctctacgagtacttcaccgtgtacaacgagttgaccaaggttaagtacgtgaccgagggaatgaggaagcctgcttttttgtcaggtgagcaaaagaaggctatcgttgatctcttgttcaagaccaacagaaaggtgaccgtgaagcagctcaaagaggattacttcaagaaaatcgagtgcttcgattcagttgagatttctggtgttgaggataggttcaacgcatctctcggaacctaccacgatctcctcaagatcattaaggataaggatttcttggataacgaggaaaacgaggatatcttggaggatatcgttcttaccctcaccctctttgaagatagagagatgattgaagaaaggctcaagacctacgctcatctcttcgatgataaggtgatgaagcagttgaagagaagaagatacactggttggggaaggctctcaagaaagctcattaacggaatcagggataagcagtctggaaagacaatccttgatttcctcaagtctgatggattcgctaacagaaacttcatgcagctcatccacgatgattctctcacctttaaagaggatatccagaaggctcaggtttcaggacagggtgatagtctccatgagcatatcgctaacctcgctggatctcctgcaatcaagaagggaatcctccagactgtgaaggttgtggatgagttggtgaaggtgatgggaaggcataagcctgagaacatcgtgatcgaaatggctagagagaaccagaccactcagaagggacagaagaactctagggaaaggatgaagaggatcgaggaaggtatcaaagagcttggatctcagatcctcaaagagcaccctgttgagaacactcagctccagaatgagaagctctacctctactacctccagaacggaagggatatgtatgtggatcaagagttggatatcaacaggctctctgattacgatgttgatcatatcgtgccacagtcattcttgaaggatgattctatcgataacaaggtgctcaccaggtctgataagaacaggggtaagagtgataacgtgccaagtgaagaggttgtgaagaaaatgaagaactattggaggcagctcctcaacgctaagctcatcactcagagaaagttcgataacttgactaaggctgagaggggaggactctctgaattggataaggcaggattcatcaagaggcagcttgtggaaaccaggcagatcactaagcacgttgcacagatcctcgattctaggatgaacaccaagtacgatgagaacgataagttgatcagggaagtgaaggttatcaccctcaagtcaaagctcgtgtctgatttcagaaaggatttccaattctacaaggtgagggaaatcaacaactaccaccacgctcacgatgcttaccttaacgctgttgttggaaccgctctcatcaagaagtatcctaagctcgagtcagagttcgtgtacggtgattacaaggtgtacgatgtgaggaagatgatcgctaagtctgagcaagagatcggaaaggctaccgctaagtatttcttctactctaacatcatgaatttcttcaagaccgagattaccctcgctaacggtgagatcagaaagaggccactcatcgagacaaacggtgaaacaggtgagatcgtgtgggataagggaagggatttcgctaccgttagaaaggtgctctctatgccacaggtgaacatcgttaagaaaaccgaggtgcagaccggtggattctctaaagagtctatcctccctaagaggaactctgataagctcattgctaggaagaaggattgggaccctaagaaatacggtggtttcgattctcctaccgtggcttactctgttctcgttgtggctaaggttgagaagggaaagagtaagaagctcaagtctgttaaggaacttctcggaatcactatcatggaaaggtcatctttcgagaagaacccaatcgatttcctcgaggctaagggatacaaagaggttaagaaggatctcatcatcaagctcccaaagtactcactcttcgaactcgagaacggtagaaagaggatgctcgcttctgctggtgagcttcaaaagggaaacgagcttgctctcccatctaagtacgttaactttctttacctcgcttctcactacgagaagttgaagggatctccagaagataacgagcagaagcaacttttcgttgagcagcacaagcactacttggatgagatcatcgagcagatctctgagttctctaaaagggtgatcctcgctgatgcaaacctcgataaggtgttgtctgcttacaacaagcacagagataagcctatcagggaacaggcagagaacatcatccatctcttcacccttaccaacctcggtgctcctgctgctttcaagtacttcgatacaaccatcgataggaagagatacacctctaccaaagaagtgctcgatgctaccctcatccatcagtctatcactggactctacgagactaggatcgatctctcacagctcggtggtgattcaagggctgatcctaagaagaagaggaaggtttgaggcgcgccgagctccaggcctcccagctttcgtccgtatcatcggtttcgacaacgttcgtcaagttcaatgcatcagtttcattgcccacacaccagaatcctactaagtttgagtattatggcattggaaaagctgttttcttctatcatttgttctgcttgtaatttactgtgttctttcagtttttgttttcggacatcaaaatgcaaatggatggataagagttaataaatgatatggtccttttgttcattctcaaattattattatctgttgtttttactttaatgggttgaatttaagtaagaaaggaactaacagtgtgatattaaggtgcaatgttagacatataaaacagtctttcacctctctttggttatgtcttgaattggtttgtttcttcacttatctgtgtaatcaagtttactatgagtctatgatcaagtaattatgcaatcaagttaagtacagtataggcttgagctccctaggctttttttcttcttcttcgttcatacagtttttttttgtttatcagcttacattttcttgaaccgtagctttcgttttcttctttttaactttccattcggagtttttgtatcttgtttcatagtttgtcccaggattagaatgattaggcatcgaaccttcaagaatttgattgaataaaacatcttcattcttaagatatgaagataatcttcaaaaggcccctgggaatctgaaagaagagaagcaggcccatttatatgggaaagaacaatagtatttcttatataggcccatttaagttgaaaacaatcttcaaaagtcccacatcgcttagataagaaaacgaagctgagtttatatacagctagagtcgaagtagtgattggaagcaagagacgttctagggttttagagctagaaatagcaagttaaaataaggctagtccgttatcaacttgaaaaagtggcaccgagtcggtgctttttttctagacccagctttcttgtacaaagttggcattacctaggcccgggcctgaggacgcgtccatggttaattaagacgtccggaccgactagtggatcctctagagtcgacctgcaggcatgcaagcttcttcgtcaacatggtggagcacgacacgcttgtctactccaaaaatatcaaagatacagtctcagaagaccaaagggcaattgagacttttcaacaaagggtaatatccggaaacctcctcggattccattgcccagctatctgtcactttattgtgaagatagtggaaaaggaaggtggctcctacaaatgccatcattgcgataaaggaaaggccatcgttgaagatgcctctgccgacagtggtcccaaagatggacccccacccacgaggagcatcgtggaaaaagaagacgttccaaccacgtcttcaaagcaagtggattgatgtgatatctccactgacgtaagggatgacgcacaatcaatcccactatccttcgcaagacccttttaagggggaagttcatttcatttggagaggacacgctgaaatcaccagtctctctgtacaaatcnatctctctctataatattgtgtaagtagttcccagataagggaattagggttcttatagggtttcgctcagctgttgagcatataagaaacccttagtcgatagatctgttggggatctaccatgagcccagaacgacgcccggccgacatccgccgtgccaccgaggcggacatgccggcggtctgcaccatcgtcaaccactacatcgagacaagcacggtcaacttccgtaccgagccgcaggaaccgcaggagtggacggacgacctcgtccgtctgcgggagcgctatccctggctcgtcgccgaggtggacggcgaggtcgccggcatcgcctacgcgggcccctggaaggcacgcaacgcctacgactggacggccgagtcgaccgtgtacgtctccccccgccaccagcggacgggactgggctccacgctctacacccacctgctgaagtccctggaggcacagggcttcaagagcgtggtcgctgtcatcgggctgcccaacgacccgagcgtgcgcatgcacgaggcgctcggatatgccccccgcggcatgctgcgggcggccggcttcaagcacgggaactggcatgacgtgggtttctggcagctggacttcagcctgccggtaccgccccgtccggtcctgcccgtcaccgagatctgatgacccaacttagtatgtatttgtatttgtaaaatacttctatcaataaaatttctaattcctaaaaccaaaatccaggggtaccgaacaagcttggcactggccgtcgttttacaacgtcgtgactgggaaaaccctggcgttacccaacttaatcgccttgcagcacatccccctttcgccagctggcgtaatagcgaagaggcccgcaccgatcgcccttcccaacagttgcgcagcctgaatggcgaatgagcttgagcttggatcagattgtcgtttcccgccttcagtttaaactatcagtgtttgacaggatatattggcgggtaaacctaagagaaaagagcgtttattagaataacggatatttaaaagggcgtgaaaaggtttatccgttcgtccatttgtatgtgcatgccaaccacagggttcccctcgggatcaa

SEQ ID NO: 705 - DNA, 14548 bp, synthetic construct
  source 1..14548: mol_type = other DNA
agtactttgatccaacccctccgctgctatagtgcagtcggcttctgacgttcagtgcagccgtcttctgaaaacgacatgtcgcacaagtcctaagttacgcgacaggctgccgccctgcccttttcctggcgttttcttgtcgcgtgttttagtcgcataaagtagaatacttgcgactagaaccggagacattacgccatgaacaagagcgccgccgctggcctgctgggctatgcccgcgtcagcaccgacgaccaggacttgaccaaccaacgggccgaactgcacgcggccggctgcaccaagctgttttccgagaagatcaccggcaccaggcgcgaccgcccggagctggccaggatgcttgaccacctacgccctggcgacgttgtgacagtgaccaggctagaccgcctggcccgcagcacccgcgacctactggacattgccgagcgcatccaggaggccggcgcgggcctgcgtagcctggcagagccgtgggccgacaccaccacgccggccggccgcatggtgttgaccgtgttcgccggcattgccgagttcgagcgttccctaatcatcgaccgcacccggagcgggcgcgaggccgccaaggcccgaggcgtgaagtttggcccccgccctaccctcaccccggcacagatcgcgcacgcccgcgagctgatcgaccaggaaggccgcaccgtgaaagaggcggctgcactgcttggcgtgcatcgctcgaccctgtaccgcgcacttgagcgcagcgaggaagtgacgcccaccgaggccaggcggcgcggtgccttccgtgaggacgcattgaccgaggccgacgccctggcggccgccgagaatgaacgccaagaggaacaagcatgaaaccgcaccaggacggccaggacgaaccgtttttcattaccgaagagatcgaggcggagatgatcgcggccgggtacgtgttcgagccgcccgcgcacgtctcaaccgtgcggctgcatgaaatcctggccggtttgtctgatgccaagctggcggcctggccggccagcttggccgctgaagaaaccgagcgccgccgtctaaaaaggtgatgtgtatttgagtaaaacagcttgcgtcatgcggtcgctgcgtatatgatgcgatgagtaaataaacaaatacgcaaggggaacgcatgaaggttatcgctgtacttaaccagaaaggcgggtcaggcaagacgaccatcgcaacccatctagcccgcgccctgcaactcgccggggccgatgttctgttagtcgattccgatccccagggcagtgcccgcgattgggcggccgtgcgggaagatcaaccgctaaccgttgtcggcatcgaccgcccgacgattgaccgcgacgtgaaggccatcggccggcgcgacttcgtagtgatcgacggagcgccccaggcggcggacttggctgtgtccgcgatcaaggcagccgacttcgtgctgattccggtgcagccaagcccttacgacatatgggccaccgccgacctggtggagctggttaagcagcgcattgaggtcacggatggaaggctacaagcggcctttgtcgtgtcgcgggcgatcaaaggcacgcgcatcggcggtgaggttgccgaggcgctggccgggtacgagctgcccattcttgagtcccgtatcacgcagcgcgtgagctacccaggcactgccgccgccggcacaaccgttcttgaatcagaacccgagggcgacgctgcccgcgaggtccaggcgctggccgctgaaattaaatcaaaactcatttgagttaatgaggtaaagagaaaatgagcaaaagcacaaacacgctaagtgccggccgtccgagcgcacgcagcagcaaggctgcaacgttggccagcctggcagacacgccagccatgaagcgggtcaactttcagttgccggcggaggatcacaccaagctgaagatgtacgcggtacgccaaggcaagaccattaccgagctgctatctgaatacatcgcgcagctaccagagtaaatgagcaaatgaataaatgagtagatgaattttagcggctaaaggaggcggcatggaaaatcaagaacaaccaggcaccgacgccgtggaatgccccatgtgtggaggaacgggcggttggccaggcgtaagcggctgggttgtctgccggccctgcaatggcactggaacccccaagcccgaggaatcggcgtgacggtcgcaaaccatccggcccggtacaaatcggcgcggcgctgggtgatgacctggtggagaagttgaaggccgcgcaggccgcccagcggcaacgcatcgaggcagaagcacgccccggtgaatcgtggcaagcggccgctgatcgaatccgcaaagaatcccggcaaccgccggcagccggtgcgccgtcgattaggaagccgcccaagggcgacgagcaaccagattttttcgttccgatgctctatgacgtgggcacccgcgatagtcgcagcatcatggacgtggccgttttccgtctgtcgaagcgtgaccgacgagctggcgaggtgatccgctacgagcttccagacgggcacgtagaggtttccgcagggccggccggcatggccagtgtgtgggattacgacctggtactgatggcggtttcccatctaaccgaatccatgaaccgataccgggaagggaagggagacaagcccggccgcgtgttccgtccacacgttgcggacgtactcaagttctgccggcgagccgatggcggaaagcagaaagacgacctggtagaaacctgcattcggttaaacaccacgcacgttgccatgcagcgtacgaagaaggccaagaacggccgcctggtgacggtatccgagggtgaagccttgattagccgctacaagatcgtaaagagcgaaaccgggcggccggagtacatcgagatcgagctagctgattggatgtaccgcgagatcacagaaggcaagaacccggacgtgctgacggttcaccccgattactttttgatcgatcccggcatcggccgttttctctaccgcctggcacgccgcgccgcaggcaaggcagaagccagatggttgttcaagacgatctacgaacgcagtggcagcgccggagagttcaagaagttctgtttcaccgtgcgcaagctgatcgggtcaaatgacctgccggagtacgatttgaaggaggaggcggggcaggctggcccgatcctagtcatgcgctaccgcaacctgatcgagggcgaagcatccgccggttcctaatgtacggagcagatgctagggcaaattgccctagcaggggaaaaaggtcgaaaaggtctctttcctgtggatagcacgtacattgggaacccaaagccgtacattgggaaccggaacccgtacattgggaacccaaagccgtacattgggaaccggtcacacatgtaagtgactgatataaaagagaaaaaaggcgatttttccgcctaaaactctttaaaacttattaaaactcttaaaacccgcctggcctgtgcataactgtctggccagcgcacagccgaagagctgcaaaaagcgcctacccttcggtcgctgcgctccctacgccccgccgcttcgcgtcggcctatcgcggccgctggccgctcaaaaatggctggcctacggccaggcaatctaccagggcgcggacaagccgcgccgtcgccactcgaccgccggcgcccacatcaaggcaccctgcctcgcgcgtttcggtgatgacggtgaaaacctctgacacatgcagctcccggagacggtcacagcttgtctgtaagcggatgccgggagcagacaagcccgtcagggcgcgtcagcgggtgttggcgggtgtcggggcgcagccatgacccagtcacgtagcgatagcggagtgtatactggcttaactatgcggcatcagagcagattgtactgagagtgcaccatatgcggtgtgaaataccgcacagatgcgtaaggagaaaataccgcatcaggcgctcttccgcttcctcgctcactgactcgctgcgctcggtcgttcggctgcggcgagcggtatcagctcactcaaaggcggtaatacggttatccacagaatcaggggataacgcaggaaagaacatgtgagcaaaaggccagcaaaaggccaggaaccgtaaaaaggccgcgttgctggcgtttttccataggctccgcccccctgacgagcatcacaaaaatcgacgctcaagtcagaggtggcgaaacccgacaggactataaagataccaggcgtttccccctggaagctccctcgtgcgctctcctgttccgaccctgccgcttaccggatacctgtccgcctttctcccttcgggaagcgtggcgctttctcatagctcacgctgtaggtatctcagttcggtgtaggtcgttcgctccaagctgggctgtgtgcacgaaccccccgttcagcccgaccgctgcgccttatccggtaactatcgtcttgagtccaacccggtaagacacgacttatcgccactggcagcagccactggtaacaggattagcagagcgaggtatgtaggcggtgctacagagttcttgaagtggtggcctaactacggctacactagaaggacagtatttggtatctgcgctctgctgaagccagttaccttcggaaaaagagttggtagctcttgatccggcaaacaaaccaccgctggtagcggtggtttttttgtttgcaagcagcagattacgcgcagaaaaaaaggatctcaagaagatcctttgatcttttctacggggtctgacgctcagtggaacgaaaactcacgttaagggattttggtcatgcatgatatatctcccaatttgtgtagggcttattatgcacgcttaaaaataataaaagcagacttgacctgatagtttggctgtgagcaattatgtgcttagtgcatctaatcgcttgagttaacgccggcgaagcggcgtcggcttgaacgaatttctagctagacattatttgccgactaccttggtgatctcgcctttcacgtagtggacaaattcttccaactgatctgcgcgcgaggccaagcgatcttcttcttgtccaagataagcctgtctagcttcaagtatgacgggctgatactgggccggcaggcgctccattgcccagtcggcagcgacatccttcggcgcgattttgccggttactgcgctgtaccaaatgcgggacaacgtaagcactacatttcgctcatcgccagcccagtcgggcggcgagttccatagcgttaaggtttcatttagcgcctcaaatagatcctgttcaggaaccggatcaaagagttcctccgccgctggacctaccaaggcaacgctatgttctcttgcttttgtcagcaagatagccagatcaatgtcgatcgtggctggctcgaagatacctgcaagaatgtcattgcgctgccattctccaaattgcagttcgcgcttagctggataacgccacggaatgatgtcgtcgtgcacaacaatggtgacttctacagcgcggagaatctcgctctctccaggggaagccgaagtttccaaaaggtcgttgatcaaagctcgccgcgttgtttcatcaagccttacggtcaccgtaaccagcaaatcaatatcactgtgtggcttcaggccgccatccactgcggagccgtacaaatgtacggccagcaacgtcggttcgagatggcgctcgatgacgccaactacctctgatagttgagtcgatacttcggcgatcaccgcttcccccatgatgtttaactttgttttagggcgactgccctgctgcgtaacatcgttgctgctccataacatcaaacatcgacccacggcgtaacgcgcttgctgcttggatgcccgaggcatagactgtaccccaaaaaaacatgtcataacaagaagccatgaaaaccgccactgcgccgttaccaccgctgcgttcggtcaaggttctggaccagttgcgtgacggcagttacgctacttgcattacagcttacgaaccgaacgaggcttatgtccactgggttcgtgcccgaattgatcacaggcagcaacgctctgtcatcgttacaatcaacatgctaccctccgcgagatcatccgtgtttcaaacccggcagcttagttgccgttcttccgaatagcatcggtaacatgagcaaagtctgccgccttacaacggctctcccgctgacgccgtcccggactgatgggctgcctgtatcgagtggtgattttgtgccgagctgccggtcggggagctgttggctggctggtggcaggatatattgtggtgtaaacaaattgacgcttagacaacttaataacacattgcggacgtttttaatgtactgaattaacgccgaattgctctagccaatacgcaaaccgcctctccccgcgcgttggccgattcattaatgcagctggcacgacaggtttcccgactggaaagcgggcagtgagcgcaacgcaattaatgtgagttagctcactcattaggcaccccaggctttacactttatgcttccggctcgtatgttgtgtggaattgtgagcggataacaatttcacacaggaaacagctatgacatgattacgaattcaaaaattacggatatgaatataggcatatccgtatccgaattatccgtttgacagctagcaacgattgtacaattgcttctttaaaaaaggaagaaagaaagaaagaaaagaatcaacatcagcgttaacaaacggccccgttacggcccaaacggtcatatagagtaacggcgttaagcgttgaaagactcctatcgaaatacgtaaccgcaaacgtgtcatagtcagatcccctcttccttcaccgcctcaaacacaaaaataatcttctacagcctatatatacaacccccccttctatctctcctttctcacaattcatcatctttctttctctacccccaattttaagaaatcctctcttctcctcttcattttcaaggtaaatctctctctctctctctctctctgttattccttgttttaattaggtatgtattattgctagtttgttaatctgcttatcttatgtatgccttatgtgaatatctttatcttgttcatctcatccgtttagaagctataaatttgttgatttgactgtgtatctacacgtggttatgtttatatctaatcagatatgaatttcttcatattgttgcgtttgtgtgtaccaatccgaaatcgttgatttttttcatttaatcgtgtagctaattgtacgtatacatatggatctacgtatcaattgttcatctgtttgtgtttgtatgtatacagatctgaaaacatcacttctctcatctgattgtgttgttacatacatagatatagatctgttatatcattttttttattaattgtgtatatatatatgtgcatagatctggattacatgattgtgattatttacatgattttgttatttacgtatgtatatatgtagatctggactttttggagttgttgacttgattgtatttgtgtgtgtatatgtgtgttctgatcttgatatgttatgtatgtgcagcgaattcggcgcgccatggataagaagtactctatcggactcgatatcggaactaactctgtgggatgggctgtgatcaccgatgagtacaaggtgccatctaagaagttcaaggttctcggaaacaccgataggcactctatcaagaaaaaccttatcggtgctctcctcttcgattctggtgaaactgctgaggctaccagactcaagagaaccgctagaagaaggtacaccagaagaaagaacaggatctgctacctccaagagatcttctctaacgagatggctaaagtggatgattcattcttccacaggctcgaagagtcattcctcgtggaagaagataagaagcacgagaggcaccctatcttcggaaacatcgttgatgaggtggcataccacgagaagtaccctactatctaccacctcagaaagaagctcgttgattctactgataaggctgatctcaggctcatctacctcgctctcgctcacatgatcaagttcagaggacacttcctcatcgagggtgatctcaaccctgataactctgatgtggataagttgttcatccagctcgtgcagacctacaaccagcttttcgaagagaaccctatcaacgcttcaggtgtggatgctaaggctatcctctctgctaggctctctaagtcaagaaggcttgagaacctcattgctcagctccctggtgagaagaagaacggacttttcggaaacttgatcgctctctctctcggactcacccctaacttcaagtctaacttcgatctcgctgaggatgcaaagctccagctctcaaaggatacctacgatgatgatctcgataacctcctcgctcagatcggagatcagtacgctgatttgttcctcgctgctaagaacctctctgatgctatcctcctcagtgatatcctcagagtgaacaccgagatcaccaaggctccactctcagcttctatgatcaagagatacgatgagcaccaccaggatctcacacttctcaaggctcttgttagacagcagctcccagagaagtacaaagagattttcttcgatcagtctaagaacggatacgctggttacatcgatggtggtgcatctcaagaagagttctacaagttcatcaagcctatcctcgagaagatggatggaaccgaggaactcctcgtgaagctcaatagagaggatcttctcagaaagcagaggaccttcgataacggatctatccctcatcagatccacctcggagagttgcacgctatccttagaaggcaagaggatttctacccattcctcaaggataacagggaaaagattgagaagattctcaccttcagaatcccttactacgtgggacctctcgctagaggaaactcaagattcgcttggatgaccagaaagtctgaggaaaccatcaccccttggaacttcgaagaggtggtggataagggtgctagtgctcagtctttcatcgagaggatgaccaacttcgataagaaccttccaaacgagaaggtgctccctaagcactctttgctctacgagtacttcaccgtgtacaacgagttgaccaaggttaagtacgtgaccgagggaatgaggaagcctgcttttttgtcaggtgagcaaaagaaggctatcgttgatctcttgttcaagaccaacagaaaggtgaccgtgaagcagctcaaagaggattacttcaagaaaatcgagtgcttcgattcagttgagatttctggtgttgaggataggttcaacgcatctctcggaacctaccacgatctcctcaagatcattaaggataaggatttcttggataacgaggaaaacgaggatatcttggaggatatcgttcttaccctcaccctctttgaagatagagagatgattgaagaaaggctcaagacctacgctcatctcttcgatgataaggtgatgaagcagttgaagagaagaagatacactggttggggaaggctctcaagaaagctcattaacggaatcagggataagcagtctggaaagacaatccttgatttcctcaagtctgatggattcgctaacagaaacttcatgcagctcatccacgatgattctctcacctttaaagaggatatccagaaggctcaggtttcaggacagggtgatagtctccatgagcatatcgctaacctcgctggatctcctgcaatcaagaagggaatcctccagactgtgaaggttgtggatgagttggtgaaggtgatgggaaggcataagcctgagaacatcgtgatcgaaatggctagagagaaccagaccactcagaagggacagaagaactctagggaaaggatgaagaggatcgaggaaggtatcaaagagcttggatctcagatcctcaaagagcaccctgttgagaacactcagctccagaatgagaagctctacctctactacctccagaacggaagggatatgtatgtggatcaagagttggatatcaacaggctctctgattacgatgttgatcatatcgtgccacagtcattcttgaaggatgattctatcgataacaaggtgctcaccaggtctgataagaacaggggtaagagtgataacgtgccaagtgaagaggttgtgaagaaaatgaagaactattggaggcagctcctcaacgctaagctcatcactcagagaaagttcgataacttgactaaggctgagaggggaggactctctgaattggataaggcaggattcatcaagaggcagcttgtggaaaccaggcagatcactaagcacgttgcacagatcctcgattctaggatgaacaccaagtacgatgagaacgataagttgatcagggaagtgaaggttatcaccctcaagtcaaagctcgtgtctgatttcagaaaggatttccaattctacaaggtgagggaaatcaacaactaccaccacgctcacgatgcttaccttaacgctgttgttggaaccgctctcatcaagaagtatcctaagctcgagtcagagttcgtgtacggtgattacaaggtgtacgatgtgaggaagatgatcgctaagtctgagcaagagatcggaaaggctaccgctaagtatttcttctactctaacatcatgaatttcttcaagaccgagattaccctcgctaacggtgagatcagaaagaggccactcatcgagacaaacggtgaaacaggtgagatcgtgtgggataagggaagggatttcgctaccgttagaaaggtgctctctatgccacaggtgaacatcgttaagaaaaccgaggtgcagaccggtggattctctaaagagtctatcctccctaagaggaactctgataagctcattgctaggaagaaggattgggaccctaagaaatacggtggtttcgattctcctaccgtggcttactctgttctcgttgtggctaaggttgagaagggaaagagtaagaagctcaagtctgttaaggaacttctcggaatcactatcatggaaaggtcatctttcgagaagaacccaatcgatttcctcgaggctaagggatacaaagaggttaagaaggatctcatcatcaagctcccaaagtactcactcttcgaactcgagaacggtagaaagaggatgctcgcttctgctggtgagcttcaaaagggaaacgagcttgctctcccatctaagtacgttaactttctttacctcgcttctcactacgagaagttgaagggatctccagaagataacgagcagaagcaacttttcgttgagcagcacaagcactacttggatgagatcatcgagcagatctctgagttctctaaaagggtgatcctcgctgatgcaaacctcgataaggtgttgtctgcttacaacaagcacagagataagcctatcagggaacaggcagagaacatcatccatctcttcacccttaccaacctcggtgctcctgctgctttcaagtacttcgatacaaccatcgataggaagagatacacctctaccaaagaagtgctcgatgctaccctcatccatcagtctatcactggactctacgagactaggatcgatctctcacagctcggtggtgattcaagggctgatcctaagaagaagaggaaggtttgaggcgcgccgagctccaggcctcccagctttcgtccgtatcatcggtttcgacaacgttcgtcaagttcaatgcatcagtttcattgcccacacaccagaatcctactaagtttgagtattatggcattggaaaagctgttttcttctatcatttgttctgcttgtaatttactgtgttctttcagtttttgttttcggacatcaaaatgcaaatggatggataagagttaataaatgatatggtccttttgttcattctcaaattattattatctgttgtttttactttaatgggttgaatttaagtaagaaaggaactaacagtgtgatattaaggtgcaatgttagacatataaaacagtctttcacctctctttggttatgtcttgaattggtttgtttcttcacttatctgtgtaatcaagtttactatgagtctatgatcaagtaattatgcaatcaagttaagtacagtataggcttgagctccctaggctttttttcttcttcttcgttcatacagtttttttttgtttatcagcttacattttcttgaaccgtagctttcgttttcttctttttaactttccattcggagtttttgtatcttgtttcatagtttgtcccaggattagaatgattaggcatcgaaccttcaagaatttgattgaataaaacatcttcattcttaagatatgaagataatcttcaaaaggcccctgggaatctgaaagaagagaagcaggcccatttatatgggaaagaacaatagtatttcttatataggcccatttaagttgaaaacaatcttcaaaagtcccacatcgcttagataagaaaacgaagctgagtttatatacagctagagtcgaagtagtgattggccgttaatttgagagtccagttttagagctagaaatagcaagttaaaataaggctagtccgttatcaacttgaaaaagtggcaccgagtcggtgctttttttctagacccagctttcttgtacaaagttggcattacctaggcccgggcctgaggacgcgtccatggttaattaagacgtccggaccgactagtggatcctctagagtcgacctgcaggcatgcaagcttcttcgtcaacatggtggagcacgacacgcttgtctactccaaaaatatcaaagatacagtctcagaagaccaaagggcaattgagacttttcaacaaagggtaatatccggaaacctcctcggattccattgcccagctatctgtcactttattgtgaagatagtggaaaaggaaggtggctcctacaaatgccatcattgcgataaaggaaaggccatcgttgaagatgcctctgccgacagtggtcccaaagatggacccccacccacgaggagcatcgtggaaaaagaagacgttccaaccacgtcttcaaagcaagtggattgatgtgatatctccactgacgtaagggatgacgcacaatcaatcccactatccttcgcaagacccttttaagggggaagttcatttcatttggagaggacacgctgaaatcaccagtctctctgtacaaatcnatctctctctataatattgtgtaagtagttcccagataagggaattagggttcttatagggtttcgctcagctgttgagcatataagaaacccttagtcgatagatctgttggggatctaccatgagcccagaacgacgcccggccgacatccgccgtgccaccgaggcggacatgccggcggtctgcaccatcgtcaaccactacatcgagacaagcacggtcaacttccgtaccgagccgcaggaaccgcaggagtggacggacgacctcgtccgtctgcgggagcgctatccctggctcgtcgccgaggtggacggcgaggtcgccggcatcgcctacgcgggcccctggaaggcacgcaacgcctacgactggacggccgagtcgaccgtgtacgtctccccccgccaccagcggacgggactgggctccacgctctacacccacctgctgaagtccctggaggcacagggcttcaagagcgtggtcgctgtcatcgggctgcccaacgacccgagcgtgcgcatgcacgaggcgctcggatatgccccccgcggcatgctgcgggcggccggcttcaagcacgggaactggcatgacgtgggtttctggcagctggacttcagcctgccggtaccgccccgtccggtcctgcccgtcaccgagatctgatgacccaacttagtatgtatttgtatttgtaaaatacttctatcaataaaatttctaattcctaaaaccaaaatccaggggtaccgaacaagcttggcactggccgtcgttttacaacgtcgtgactgggaaaaccctggcgttacccaacttaatcgccttgcagcacatccccctttcgccagctggcgtaatagcgaagaggcccgcaccgatcgcccttcccaacagttgcgcagcctgaatggcgaatgagcttgagcttggatcagattgtcgtttcccgccttcagtttaaactatcagtgtttgacaggatatattggcgggtaaacctaagagaaaagagcgtttattagaataacggatatttaaaagggcgtgaaaaggtttatccgttcgtccatttgtatgtgcatgccaaccacagggttcccctcgggatcaa

SEQ ID NO: 706 - DNA, 20 bp, synthetic construct
  source 1..20: mol_type = other DNA
gccgttaatttgagagtcca

SEQ ID NO: 707 - DNA, 96 bp, synthetic construct
  source 1..96: mol_type = other DNA
gccgttaatttgagagtccagttttagagctagaaatagcaagttaaaataaggctagtccgttatcaacttgaaaaagtggcaccgagtcggtgc

SEQ ID NO: 708 - DNA, 476 bp, Glycine max
  source 1..476: mol_type = genomic DNA
cacgtggccccacacacattttttttccctcaacagttaaactctcttcctccatctttcttggtaggtggcacttctcggagcatagtaaaactaaccccacatttttctttttcattttcattttcattatattataaacctatatatatacccaattggttattggtgtctggtgtcccttcaacctttaaaacaaacaaatccattttctttttcttttttttttcattttattttttccattattttatcaacacaattaattccatgtgtatcctttggtcctttctgtcccacagcacatatatatagtctcgctttacatactcattccatggccagtacacacaccacacctcattatatctttctttcaattcctatcctcttccttgtagtgtacccattttgaatgtgttctctctctctctctctttctttaggtccctggtgaatatctagaaccactctct

SEQ ID NO: 709 - DNA, 92 bp, synthetic construct; identical to SEQ ID NO: 201
  source 1..92: mol_type = other DNA

SEQ ID NO: 710 - RNA, 36 nt, synthetic construct
  source 1..36: mol_type = other RNA
aaatgaaaaagaaaaatgtggttttagagctatgct

SEQ ID NO: 711 - RNA, 36 nt, synthetic construct
  source 1..36: mol_type = other RNA
aaaggaccaaaggatacacagttttagagctatgct

SEQ ID NO: 712 - RNA, 36 nt, synthetic construct
  source 1..36: mol_type = other RNA
aagaaagatataatgaggtggttttagagctatgct

SEQ ID NO: 713 - DNA, 473 bp, Glycine max
  source 1..473: mol_type = genomic DNA
atggcaagaatgcctttagagcctctaatagtggggagagtcataggagaagttcttgattcttttaccacaagcacaaaaatgattgtgagttacaacaagaatcaagtctacaatggccatgaactcttcccttccactgtcaacaccaagcccaaggttgagattgagggtggtgatatgaggtccttctttacactggtactatatatatatcttttatctcctctcttattccttttctctttaaagaacaaagttttttgggaaaaaaaagagaggaaaaacttgagctgttgccagtgtgtatctttgttgtttcctgtaattcagctcacacagtaagtctcttttggagttttctttaccaatactgaatcattaagctaatgtctcgcttttttggtgcagatcatgactgaccctgatgttcctggccctagtgacccttatctgagagagcacttgcactg

SEQ ID NO: 714 - RNA, 36 nt, synthetic construct
  source 1..36: mol_type = other RNA
cttgggcttggtgttgacaggttttagagctatgct

SEQ ID NO: 715 - RNA, 36 nt, synthetic construct
  source 1..36: mol_type = other RNA
cactagggccaggaacatcagttttagagctatgct

SEQ ID NO: 716 - DNA, 500 bp, Glycine max
  source 1..500: mol_type = genomic DNA
aattaattgacaaaaaatggtttctgtttcatatagaaactatgtttttgttgtgtagtcatacattacggaatctagtttccattaaataagtaacgtgaaaaaaaataaaaggtgaaatatatattgttggaaaagaagctatgaggtgcaagaaccgatcacatggagaaggcaatgaaagacaaggaggagcaatggaagagagaaaatgagaagatggaagggatgtgaaaatgtttgaaaaaaacgaggtgatcagttttaaaatacgaatttagtattttctttttaagaaaattctttcggaaagtcgtgttttaaaacatgacttttatttatttgaagtcgtgttctaaaacatgactttatttcatatcctttaatattttatatccttaatatttttaaaatttatccatttgtaatattttttaaaaattgacccatatatgtaaaatacccgtcaagatctctttattattttgaaagcgaaagca

SEQ ID NO: 717 - RNA, 36 nt, synthetic construct
  source 1..36: mol_type = other RNA
ttgttggaaaagaagctatggttttagagctatgct

SEQ ID NO: 718 - RNA, 36 nt, synthetic construct
  source 1..36: mol_type = other RNA
gaaaatgtttgaaaaaaacggttttagagctatgct

SEQ ID NO: 719 - RNA, 36 nt, synthetic construct
  source 1..36: mol_type = other RNA
aaataataaagagatcttgagttttagagctatgct

SEQ ID NO: 720 - DNA, 500 bp, Glycine max
  source 1..500: mol_type = genomic DNA
cgtacattttttttcttacatgctgaaatggaagaaattaaagaacataaagtataaagtatggtcatgaaaattgtaagaggaatttccgggtaaaagtccaaaaccgaaagaaaaaataggtcaagccataacatgtatatgctgtcccaccacagtttagtctctgcagactttttgtcaagccgcgtgggtcccacttctggcggacccaccacactaatgtcgtaataatgtggagagtcgcaattacaagtccattttctttcaagatttcttagagacttttgtgccccctaggcctccacgaccaagtcataacccaaactcaaatatttaataaaaataaatccatcaattagcatagttatgaaaccaaccattccttataaataccctcacaacacatattcattttatatcaactaactttgtgcttcctccgcagaaaaataaaaaaagagtagctagcactagctagctaaacacagtacgagtag

SEQ ID NO: 721 - RNA, 36 nt, synthetic construct
  source 1..36: mol_type = other RNA
agtctgcagagactaaactggttttagagctatgct

SEQ ID NO: 722 - RNA, 36 nt, synthetic construct
  source 1..36: mol_type = other RNA
acttggtcgtggaggcctaggttttagagctatgct

SEQ ID NO: 723 - RNA, 36 nt, synthetic construct
  source 1..36: mol_type = other RNA
taaaatgaatatgtgttgtggttttagagctatgct

SEQ ID NO: 724 - DNA, 288 bp, Glycine max
  source 1..288: mol_type = genomic DNA
gaaagagcagagagaatgggcacagatccttcaaaaggagtcccaaaccccaactgggcgtggcaaacacatggccaggttactgacaccccagtaccaccgttctctactgcagcatcatcaggattctcaatttcagccacttttccatcaactgccatctttccaacaaaatccatcaactcagttccccatagcctctgtttcacttcacccagcacaccaggtagcaacgcacctcaattctataactattacgaggtgaagtccccgcagccaccgtcctag

SEQ ID NO: 725 - RNA, 36 nt, synthetic construct
  source 1..36: mol_type = other RNA
gatgctgcagtagagaacgggttttagagctatgct

SEQ ID NO: 726 - DNA, 221 bp, Glycine max
  source 1..221: mol_type = genomic DNA
gagaatgggcacagatccttcaaaaggagtcccaaaccccaactgggcgtggcaaacacatggccaggttactgacaccccagtaccaccgttctctactgctgcctcttccggtttttccatttcagccacttttccatcaactgccatctttccaacaaaatccatcaactcagttccccatagcctctgtttcacttcacccagcacaccaggtagca

SEQ ID NO: 727 - DNA, 344 bp, Glycine max
  source 1..344: mol_type = genomic DNA
tgatggttcaagtagtttgtctagttcctgtactttcttggagtatgtcatgtaacgagctgttgtatttataatttttgttttggtttttgaccttgttacatacagcacattggtatgtagatatatctggcatatcaaaactggtcaaaatgtaacattattttatggtatcatgttgtttccatacataagtgttcgttttacacagtagtaattgctttacccgaaagagtaggtgctctgcttcctctgtgcatgggaggaggttttatattgcttgcctagaagactagtgattgtcatacacattagctgttattctaattgattgtttcatgtca

SEQ ID NO: 728 - RNA, 36 nt, synthetic construct
  source 1..36: mol_type = other RNA
gacatactccaagaaagtacgttttagagctatgct

SEQ ID NO: 729 - RNA, 36 nt, synthetic construct
  source 1..36: mol_type = other RNA
ccttgttacatacagcacatgttttagagctatgct

SEQ ID NO: 730 - RNA, 36 nt, synthetic construct
  source 1..36: mol_type = other RNA
aaacctcctcccatgcacaggttttagagctatgct

SEQ ID NO: 731 - DNA, 216 bp, Glycine max
  source 1..216: mol_type = genomic DNA
aactattcttccataatcaccgtccatccagaggtcatcgatgggagacccggtacaatggtgatcgaatcatttgtggtggatgtgcctgatgggaacaccagggatgaaacttgttactttgtggaggctttgatcaggtgtaacctaagctctttagctgatgtctcagagaggatggccgtgcaaggtcgaaccaatcctatcaaccattaa

SEQ ID NO: 732 - protein, 71 aa, Glycine max
NYSSIITVHPEVIDGRPGTMVIESFVVDVPDGNTRDETCYFVEALIRCNLSSLADVSERMAVQGRTNPINH

SEQ ID NO: 733 - RNA, 36 nt, synthetic construct
  source 1..36: mol_type = other RNA
ggtgatcgaatcatttgtgggttttagagctatgct

SEQ ID NO: 734 - DNA, 202 bp, Glycine max
  source 1..202: mol_type = genomic DNA
ggtttaatactcaatcatgttgtggaatttgcagaactattcttccataatcaccgtccatccagaggtcatcgatgggagacccggtacaatggtgatcctatcatttgtggtggatgtgcctgatgggaacaccagggatgaaacttgttactttgtggaggctttgatcaggtgtaacctaagctctttagctgatgtc

SEQ ID NO: 735 - DNA, 539 bp, Glycine max
  source 1..539: mol_type = genomic DNA
aaattctaaaaataaaaaaaataatttataaggataaaaaaattaaatcataaaaatcaaaaagatatttcaaccttaacgttaaatacatatgtaataatacagttagaattacaaataaggtgactgcagtagaatatatgtgtaatgacgatggatgggcatccatgtccatgataaagatggatggacatgaacatacatacatatgtgtaagagtagcatgacgtgacacggggtaggactcaggaggtgagaggaaaatatcattgccacgtattcaatcaatctaggcttctcagagctgctaaagatcttctctttctttctctctcccagttgtgttctcttctctagtttgtttctgcagttttgcctctctctctctctctctcactatctatctatcccaccataaccattaaccaccacctcttaaatatttttccacaaatcaccaaaatttcccatttttttcaccctctgaatcacaatttttttctttctaactaaaatcgcctctacacacaaggattcag

SEQ ID NO: 736 - RNA, 36 nt, synthetic construct
  source 1..36: mol_type = other RNA
gagtagcatgacgtgacacggttttagagctatgct

SEQ ID NO: 737 - RNA, 36 nt, synthetic construct
  source 1..36: mol_type = other RNA
gcctagattgattgaatacggttttagagctatgct

SEQ ID NO: 738 - RNA, 36 nt, synthetic construct
  source 1..36: mol_type = other RNA
ctagagaagagaacacaactgttttagagctatgct

SEQ ID NO: 739 - DNA, 546 bp, Glycine max
  source 1..546: mol_type = genomic DNA
aatttaatctaatggtagataatgtgttcaaaggaacgcttgataacatttctcgtgataaatacgtatttatgagactatttagttatgatcatccatgtcaattaatttccaacccaaagtaatgatcatgtgccaagttgccacccataatttatctcaaaattaatgaaacccaaataaaggcgttgaataataccaccatacaaaagtgtgttatttagcagcatatgtaactaggcatatatctatctgtatatatgagagttgattatgtgtcacatatgaacctttgagacataccatgggttctttttggcatacgcggcgaaatggattacgtcaaatacagcttttgtttaatgcttaaagctttggcagccgatggaaatttcattggcattgtcaacgccttcccctactataagtacaatcacactccttgtctctccctcacaacactaggccttcaatttggttttgtttcatcagttttccagatacagcacattgattgttaaggcgaaatggctgatattgagggtt

SEQ ID NO: 740 - DNA, 43 bp, synthetic construct; identical to SEQ ID NO: 186
  source 1..43: mol_type = other DNA

SEQ ID NO: 741 - RNA, 36 nt, synthetic construct
  source 1..36: mol_type = other RNA
agtgttgtgagggagagacagttttagagctatgct

SEQ ID NO: 742 - RNA, 36 nt, synthetic construct
  source 1..36: mol_type = other RNA
gaacctttgagacataccatgttttagagctatgct

SEQ ID NO: 743 - RNA, 36 nt, synthetic construct
  source 1..36: mol_type = other RNA
gggttggaaattaattgacagttttagagctatgct

SEQ ID NO: 744 - DNA, 474 bp, Glycine max
  source 1..474: mol_type = genomic DNA
ttgtttactcctagttattatcttaaaaaaattgaatcatataattatatattaagttttgaatatgtgtttccatcttatagtttatgagattaccatgtgtttaacagattgggatctacaaactttaaaagtaagcagtagatacataatagttttataggcctggttggttagctgaaatttacagctactacgcggataatgaaccccaatgatgaaaacatgcagacgcatgttgcagcatggaagtattttatttaataagaataataataaggtaagtggtagtaattaaattccatattcagtatcatgggaaatgagattctttgcctttgggatacaccattaggcttttagccgttccactgtgtatatgcggcgaaatgcattactccatggcccttgggaatccacttgcctcctatcagactcttacgtagtcaacgccttcgcctactataaaaacac

SEQ ID NO: 745 - RNA, 36 nt, synthetic construct
  source 1..36: mol_type = other RNA
atttcgccgcatatacacaggttttagagctatgct

SEQ ID NO: 746 - RNA, 36 nt, synthetic construct
  source 1..36: mol_type = other RNA
tgaaatttacagctactacggttttagagctatgct

SEQ ID NO: 747 - RNA, 36 nt, synthetic construct
  source 1..36: mol_type = other RNA
atcccaatctgttaaacacagttttagagctatgct

SEQ ID NO: 748 - DNA, 434 bp, Glycine max
  source 1..434: mol_type = genomic DNA
caaaaattaattcttttagtaatgatagaatctaatatcttaattcaatgattaattataacttaagtcttcctttaaaataaatctcatctcatctccttcttccttttttgagagagaatctcatctcattcttcggtgatcaaatctagtgccagtaccgtacttggtacgctaccttcacttgcctatgtgcttatcagctatcacctacctttcataatttaatataaaaaataaataaacaatgtcgctgcaaagcatgttcatgttcattaattcatttttattattaaaaaaaaaacacccctttattaggcggcggaaaaactcacggtatctttccaccactttctttatctttagagatcttcttttatatatatatatatatatagatagatagatagatagatacagagatgaaaaatact

SEQ ID NO: 749 - DNA, 12 bp, synthetic construct
  source 1..12: mol_type = other DNA
gtaagcgcttac

SEQ ID NO: 750 - RNA, 36 nt, synthetic construct
  source 1..36: mol_type = other RNA
gtgatagctgataagcacatgttttagagctatgct

SEQ ID NO: 751 - RNA, 36 nt, synthetic construct
  source 1..36: mol_type = other RNA
ttaggcggcggaaaaactcagttttagagctatgct

SEQ ID NO: 752 - RNA, 36 nt, synthetic construct
  source 1..36: mol_type = other RNA
tctctctcaaaaaaggaagagttttagagctatgct

SEQ ID NO: 753 - DNA, 514 bp, Glycine max
  source 1..514: mol_type = genomic DNA
aaagaagctatgaggtgcaagaaccgatcacatggagaaggcaatgaaagacaaggaggagcaatggaagagagaaaatgagaagatggaagggatgtgaaaatgtttgaaaaaaacgaggtgatcagttttaaaatacgaatttagtattttctttttaagaaaattctttcggaaagtcgtgttttaaaacatgacttttatttatttgaagtcgtgttctaaaacatgactttatttcatatcctttaatattttatatccttaatatttttaaaatttatccatttgtaatattttttaaaaattgacccatatatgtaaaatacccgtcaagatctctttattattttgaaagcgaaagcatatcacttcaaacacaatggaatcgaggctattgactaagtataaatagagaagacttcatatcggggttcataattcataacaaagcaaacgagtatataagaaagcataagccaaattttgagtaaactagtgtgcacactatccc

SEQ ID NO: 754 - RNA, 36 nt, synthetic construct
  source 1..36: mol_type = other RNA
gctcctcactagctaccaaggttttagagctatgct

SEQ ID NO: 755 - RNA, 36 nt, synthetic construct; identical to SEQ ID NO: 718
  source 1..36: mol_type = other RNA

SEQ ID NO: 756 - RNA, 36 nt, synthetic construct
  source 1..36: mol_type = other RNA
atagagaagacttcatatcggttttagagctatgct

SEQ ID NO: 757 - RNA, 36 nt, synthetic construct
  source 1..36: mol_type = other RNA
aataataaagagatcttgacgttttagagctatgct

SEQ ID NO: 758 - DNA, 269 bp, Glycine max
  source 1..269: mol_type = genomic DNA
atcggatttcattgggatccatataattgcgttttcaatttctgtgtccttaaacaagctatgccagagaattaatttaattttaagtgttagctttattattttactttcaaatcattgaggaaaacaatggcctatatattattcctatatgtaacatacaataatgttattgcaatagcgtgtacttcaacctaattatttaataccaagtttctatattaatgttgtatcttatgaaatccttctattttccattctataaatta

SEQ ID NO: 759 - DNA, 92 bp, Glycine max; identical to SEQ ID NO: 202
  source 1..92: mol_type = genomic DNA

SEQ ID NO: 760 - RNA, 36 nt, synthetic construct
  source 1..36: mol_type = other RNA
attttactttcaaatcattggttttagagctatgct

SEQ ID NO: 761 - RNA, 36 nt, synthetic construct
  source 1..36: mol_type = other RNA
cattattgtatgttacatatgttttagagctatgct
